United States Patent Application Publication US 2026/0097106 A1 - sequence listing, part 3

SEQ ID NO: 13 - DNA, 5239207 bp, Escherichia coli (residues 3,492,807-5,239,207 of 5,239,207)
  source 1..5239207: mol_type = genomic DNA
gttgccgcgccaacgccgattcgctgccaacatgccgaacagactgcacaaaatgcgccattaaacctgcaaacgctggaagctatcagcgaatctgtcctgcaagatgtcgccccgcgttcttcatggcgggccagtaaagagtttcgtctgcatctcatccagacgatgaccaaaaaagtgattagcgaagccgtcgccgcggcggggggaaaattgcaatgaatcacagcgaaacaattaccatcgaatgcaccattaacgggatgccttttcagcttcacgccgcaccaggcacgccgctctcggaattactccgcgaacaaggactgctaagtgtcaaacaagggtgctgcgtgggtgaatgtggtgcctgtacggtgttggtcgacggcacagcaatagacagttgcttataccttgccgcctgggctgaaggaaaagagatccgcacgctggaaggtgaagcgaaaggcggaaaactttctcatgttcagcaggcttatgcgaaatccggcgcagtgcagtgcgggttttgtacgcctggcctgattatggctaccacggcaatgctggcgaaaccacgcgagaagccattaaccattacggaaattcgtcgcggactggcgggaaatctttgtcgctgcacggggtatcagatgattgtaaatacagttctggattgcgagaaaacgaagtaaaaggatatccggcctgaattcaggccggattcactgaggttatgtgtttaacaactcatatttcttaatcttgcgatagagcgtagcaatgccgatgcccagttcatcagcaacttgcttcttgctgttatgacgtgaaagcgcctcgcggatcatttgcttttccatctcctccagcgccgtgccgcccgcatcatcgagtgacaggtgcgcctcactgacctctgttacatcactttgctccgttgtgccattattcagcagatttggcggcaatagcgtgctgtcgataacttcacctgaaggaaccacgttaaccagatattccatcaaattgcttaactcgcgcaggtttccgggccaacgatgcttacgcaatatttcgacgacatcgggagcaatgccaggataaaccgatcccagacgacgggtatgcagatgtaaaaagtaatgcaccaatagttcaatatcttcctgacgttcacgcagcggtggcagagttatcgggataacattaagtcggtagaagagatcttcgcggaatttaccttcggcaatgaactgggccaaattctgattagttgcagaaatgatgcgaatgtcgacttgtattgggctactggcaccaatcggcagaatttcacgtgcctcaatagcgcgcagtaatttagcctgcaacattaatggcatatcacctatttcatcgagaaacagcgtgcccgtattcgccgcctgaatcaaccctgttttaccgttggcagaagcgccagtaaatgcacctttaacataaccgaacagttcgctctccagaagctgctccggaatcgcggcacagttgatagcaataaagggtttattccgtcttccgctcaacttatggattgcacgggcgacgacttctttacccgtgccgctttcaccaaccaccataacgctggatgggctgggtgcaatacggctaatgagtcgttttaattgccgcataacacggcactcgccaaccaattgttcaatatgcggttcatcaggtgcatttgctacagaaaaactggtatgcgattggtgaaacgccattaaaaataattgtcggccctgaatgttatgcaattgaccaatgattaattcacttttatcgtcccatgaaacaatatgctgcatatgtccatgggtaaaattactctcaaatgttaatggtctgaaacggataggtttcccaataatattattttgcacaacaccaagtgtttttaaggcagtctgattaacaaactgaacccgattttcatcatctacaactaatacgccctgatccatattatcgatcatggtcgcaaatattttactgatgttatctcctggcccctgatcctccagaagtttcgaaacaaaaatggtggatatatggcgaacataatcagaaaattcgcgtaaattatcactgatatgctcttgttgctcgtgggtaacggcaatcaaacttatcaccccaacacaacgatcctgtaaaatgacaggcgtacccagaaatgctttttcgcggcaattttctttactatcgcaaccttcgcaaaggggatcgaagcgagactgtgtcacaactttttcagttttcgtttccaggacgtggcggagcaggcgtgagttgccgctcaactggcgaccaagaaacttcccatacgcgcccgttccggcaacgcgacacaagttttcatcaacgatctcaacctcaagctgcaaaacgctggcaagcattctggcaaaacgctgaattgtcggttgaatttgcatcaatactgactgcgtagtagcaagctccatagctttaccttccagacttacttaaaagtcgatcattgaagacgttgatggttcacagatcatgatgatattaactcaggcgaaattggctttgataaaaacataagatttttatcattttctaatgaaattatggaagagatatcacatttctatatcaatatgagaattacggcggtgagtttatcaaactgaagagagatagcctgcccctttatcttatttctgatacttagcagcaaataaataacgcgataaaaaaagccaaacgttttcgtattttacaaacaaccagaagctggcatcaatttgtgatcaaccccacacattatccgtcaaattagtcttttgcagccgcgcggataattctggcacacttattgttagtcccaggtatagctgtgaaaacaccaatcactttggcaagtcacagtgaaataaaccactttgcctgtcattccactaccgggactttatgatgaaaactgttaatgagctgattaaggatatcaattcgctgacctctcaccttcacgagaaagattttttgttaacgtgggaacagacgccagatgaactgaaacaagtactggacgttgccgcagcattaaaagcactgcgtgctgaaaacatctcaaccaaagtctttaatagtggattaggtatttccgtattccgcgacaactccacccgtacccgcttctcttatgcttccgcgcttaacctgctcggccttgcacaacaagatctcgacgaaggcaaatcacaaatcgctcacggcgaaaccgtgcgtgaaaccgccaatatgatctccttctgcgccgacgctattggtattcgcgacgatatgtatctgggcgcaggcaacgcctatatgcgtgaagttggcgctgcacttgatgacggttacaagcagggtgtactgccacagcgtccggctttagtgaacctgcaatgcgatattgaccacccgactcagtcaatggctgacctcgcgtggttacgtgaacactttggttcactggaaaacctgaaaggtaaaaaaatcgccatgacctgggcctactctccaagctatggcaaaccgctctctgtaccacaaggcatcatcggtctgatgactcgcttcggtatggatgtcaccctggcccatccggaaggctacgacctgatcccggatgtggttgaagtggcgaaaaacaatgctaaagcctccggtggtagcttccgtcaggtcaccagcatggaagaagccttcaaagacgcagacatcgtttatccgaagtcatgggcaccttacaaagtgatggaagagcgtactgaattgctgcgtgcgaacgatcacgaaggcttaaaagcactggaaaaacagtgtctggcacagaacgcgcaacacaaagactggcattgtactgaagagatgatggaactgacccgtgatggcgaagccctgtacatgcactgcctgccagctgatatcagcggcgtatcctgtaaagaaggtgaagtgactgaaggcgtattcgaaaaataccgtatcgctacctacaaagaagccagctggaagccttatatcatcgccgcgatgatcctgtcccgtaaatacgccaaaccaggtgcactgctcgaacaactgctgaaagaagcgcaagaacgcgtgaaataacccctcgggccgatcagctggtcggccctctatttccagaggccaaaaggataggatatgtccgttttctcattgaagattgatatcgccgataacaaatttttcaacggcgaaacatcaccgctcttttcgcaaagccaggccaaactggcgcgccagttccaccagaaaatagctggttatcgcccaacaccgctttgtgcgctggacgatctcgcaaacctttttggtgtgaagaaaattctcgtcaaagacgaatcaaaacgattcggtctgaacgccttcaaaatgcttggcggtgcgtacgccatcgctcaattattgtgtgaaaaatatcatcttgatatcgaaacgctgtcatttgagcacctgaaaaatgccatcggcgaaaaaatgactttcgcgaccaccaccgacggcaaccacgggcgcggtgtggcgtgggcagcacagcaactcggacagaatgcggtgatttacatgccgaaaggttctgctcaggaacgcgttgacgccattctgaacctcggtgccgagtgcatcgtcacggatatgaactatgacgataccgttcgcctgaccatgcaacacgcgcagcagcacggctgggaagtggtacaggacacggcatgggaaggttacaccaaaatcccaacctggatcatgcaaggctacgcaaccctggcagatgaagccgtcgagcaaatgcgtgaaatgggcgtaaccccgacgcacgttctgctgcaagccggtgtcggagcaatggccggtggtgtgctgggttatctggtcgacgtctatagcccgcaaaatctgcacagcattattgttgaacctgacaaagctgactgtatttatcgctccggcgtcaaaggcgacatcgtcaacgttggcggtgatatggccaccatcatggcaggcctggcctgtggcgaacctaacccgctgggctgggaaatcctacgtaactgcgccacccaattcatctcctgccaggacagcgttgccgcattaggtatgcgcgtgctgggtaatccgtacggcaacgacccgcgcatcatctccggtgaatccggcgctgtcggtttgggcgttctcgcagcggttcattatcacccgcaacgtcaaagcctgatggaaaaactggcgctgaacaaagatgccgtggtgctggttatcagcactgaaggcgacaccgacgtgaagcactaccgcgaagttgtctgggaaggcaaacacgctgtagcaccttaatcaccctattggaactgctccctgcaaaacggggagtaaaaaatctggagaaaaataatggctaagaatattccattcaaactgattcttgaaaaagcaaaagattaccaggcggatatgactcgcttcctgcgcgacatggttgctattcccagtgaaagctgcgacgagaaacgcgtagtacatcgtattaaagaagagatggaaaaagtcggcttcgataaagttgaaatcgacccgatgggcaacgttctcggttatatcggccacggcccgcgtctggtggcaatggacgctcatatcgataccgtcggcattggcaacatcaaaaactgggacttcgatccgtacgaaggcatggaaactgatgaactgattggtggtcgcggtacttccgaccaggaaggtggcatggcctctatggtttatgccggtaaaatcattaaagacctcggtctggaagatgaatataccctgctggttaccggtacggtgcaggaagaagactgcgacggtctgtgctggcagtacattattgaacaatccggcattcgcccggaatttgtggtcagtaccgaaccaaccgactgccaggtataccgtggtcagcgcggtcgtatggaaattcgtattgatgttcagggtgttagctgccacggttctgcaccagaacgcggtgataacgccattttcaaaatgggtccgattcttggcgaattacaagaactctcccaacgtctgggttatgacgaattcctcggcaaaggcaccctcaccgtttctgaaatcttcttcacatccccaagccgttgcgctgtagcagacagctgcgcagtttcaatcgaccgtcgtctgacctggggcgaaacctgggaaggcgcgctggacgaaatccgcgccctgcctgcagtacagaaagctaacgcggttgtttctatgtacaactacgaccgtccgtcctggactggcctggtttacccaaccgaatgctacttcccgacctggaaagtggaagaagatcacttcaccgttaaagcactggtgaatgcctacgaagggctgtttggcaaagcgccggttgttgataagtggaccttctcaactaacggcgtatctatcatgggccgtcacggcattccggtgatcggctttggcccgggtaaagaacctgaagcgcatgcacctaacgaaaaaacctggaaatctcacctggtgacctgtgccgcgatgtacgctgcaatcccgttaagctggctggcaacagagtaattactcttcacttattcccctccggttcgccggagggtttttggagtttgctatgcgcgtattgatcaaaaacggcactgtcgttaacgcagatggacaagccaaacaggatttgctgattgaaagcgggattgttcgccagttgggcaacaatatttcgccgcagctcccgtatgaagaaattgatgccactggctgttacgttttccctggcggcgtggatgtccatacgcatttcaatattgatgtcggcatcgcgcgcagttgtgatgatttttttaccggtacccgcgcagctgcgtgtggcggtacaacaaccattattgaccatatgggatttggcccaaacggctgtcggttacgccatcaactggaggtttatcgtggttatgccgcccataaagcggtcatcgattacagctttcacggtgtgatccagcacattaatcacgcaatcctcgacgaaatcccgatgatggtcgaggaaggactgagcagttttaaactctatttaacctatcaatacaaactcaacgatgacgaggttttgcaggcattacgccgcttgcatgaatccggcgcgctgaccaccgtgcacccggaaaatgatgcggctatcgccagcaagcgggcggaatttatcgccgcagggttaaccgcgccgcgctatcatgccttgagtcgccctctggaatgcgaagcggaagccatcgcccgcatgattaacctggcacaaattgccggtaacgccccgctctatatcgtgcacctgtctaacggcttaggtctggattatctgcgtcttgcccgtgcgaatcaccagccagtctgggttgaaacctgcccacaatatctcctgttggacgaacgcagttacgatacagaagatggcatgaagttcattcttagcccaccgctgcgtaacgtacgcgagcaggacaaactgtggtgtggcatcagcgatggtgcgattgacgtggtggcaaccgatcactgcaccttctcgatggctcaacgcctgcaaatttctaaaggcgatttcagtcgctgcccaaatggcttacccggtgtggaaaaccgcatgcagttactgttttccagtggcgtgatgacgggacgtataacaccggaacgctttgttgaattaaccagcgcaatgcccgccaggttgtttggcctgtggccgcaaaaaggattattagcgcccggttccgacggcgacgtggtgattatcgacccacgtcagagccaacaaattcagcatcgccatctccacgacaacgccgactactcgccatgggagggttttacctgtcagggcgcgattgtcagaaccttatcccgtggtgaaacgattttctgtgacggcacctttacaggcaaagccgggcgaggtcgtttcctgcgacgcaaaccgtttgtccctcccgtgctctaaccactgccagggatctatacacaatcaagaatgatgagtgaggaaaaatgagtaagaaaattgttctcgccctgggcgggaatgcgctgggcgatgacctggccgggcaaatgaaagcggtaaaaattacttctcaggcaattgttgatttaattgcccagggacatgaagttatcgtcactcatggtaacgggccgcaggtgggcatgattaaccaggcctttgaagctgccgcaaaaactgaagcgcactcgccaatgctgccgatgtctgtctgtgttgcattaagccagggttatattggttacgatctacaaaacgctttaagagaagaactgctttctcggggcattaataaacctgtagcaacgctggttactcaggtcgaagtcgacgctaacgatccggcattcctcaacccgaccaagccgatcggttcgttctttaccgagcaagaagcagagcaactgacaaaacagggttacactctgcaagaagatgctggtcgcggctatcgccgtgttgttgcctcgccaaaaccggttgatatcattgaaaaagaaacggttaaagctctggtagatgcaggtcaggtggtgatcaccgttggcggtggtggtatccctgttattcgtgaaggtaaccatctgcgtggtgccagcgcggttatcgataaagactgggccagcgcccgtttagcagaaatgattgatgccgatatgctgatcattctgactgcggtagaaaaagtggccattaacttcggtaaagagaatgaacagtggctcgatcgcctgtcattaagtgatgctgaacgctttatcgaagaaggtcattttgcgaaaggttctatgctgcctaaagtggaagctgccgcctcgtttgctcgctctcgcgcaggtcgtgaagcactgattaccgtattgagcaaagcgaaagaagggattgaaggcaaaacaggaacggtgatttgtcagtaatttaaaggccgggtgggtaataccatccggccaaagattgtcaagtaagtgcgctttgttgatgccggatgcggcgcgagcgccttatccgtcctacaaaacatcgcaaattcaatagattgcaatgcacttgtaggcctgataagcgtagcgcatcaggcaatttggcgtttgtcatcagtctcaggccgggtgggtaataccatccggccattttcatttaagccacttccagcacttcttttgtcgctttcacgccctgatgcatcaacatcattaacgcctcaagtacgccgccgccaatcgcccgggctttatcagaaacgctggtgaaatcagcggtttcaccacgaggatcgatatcaccaattttaaaaccaccaaccactgccaggccgtcgttcaacaagccacgcaccatccccgtcaacggtgctttaatttcatgctcaccaatccaggcaatcacatcgccctctttcaccagatcgcctaatttcacgttggatcgcataatgcctgcagcaggagcacggatcacccgtcgggtggtatgccccataatattgccaggaacaccggtattctcctgcgcacaaccagagtaaatcacctgaccgagccagtgcccgcgatttgtttcaattaccgcatgacaatccttcccagcagtaaagcccggcccaagcgcgattgttactggtgccatatctgcccgcgttcccaaattctgtttcgccagaatagcgtccaccacgcaaagcggtttcagttcatcaagcaatgaacaggcgggatctaccatcacaggaatgaatccgcgttcggtaagtttcatcgcttccgcagagctggttgccaggcgagcagtgacgccttcgaccgtcatttcgccatcgaacacggcctgggcaaacgccacggtacaacgaatcactgtcggtttttccacttccagcatgatcactttaaaacccgcatgatacagacgtagcgccacaccactggcgatatctcccgcaccgcgaatcaccaccagctggtgtccggaaggatgagaaggtttcatcatcagcccacccggcgcgttatttttcacctgtaatatttctgccagcacgctgatggcgatctcctgcggcgtttccgcacctatgttgtaaccaacgggcgcatgtaaacgggcaatatgttcttcagccacgcctttctcacgcaattgacgcaggaaaagctgaaccttgcgacgacttgccagcaaccccaaccatgcaatgggctgttcaatgagtttgtcgagggcttcacgatcctgattattcgtggcaatcaggacaaaattatcagggcgaatatccagtgcttccactgccgcaccaaacgactcagcatggagaagcgtggttgatggtgggaatagttcaggattgaggctttcgcgataaatatcagcaacggcaatatcaaatcctaatagcgccgcactctgggctatcgcccggttgacatgccccgcgccaatcaacaccagacgtggacgcataccatggacgctgataaatactgacattgcacctccacaatctgacccgacagcatccgcaccgttacgagccatacgtccatggaataatcgcggcttacgttcctgcaatgcctgaagcgactcttcaatcaccttccgctcaaccattccgccaccaattgtaccgacgatagaaccatcggcgcgcactaacatttgtgcagaatggcggggagtcgagcctcggctatcaacaatttgcgccatagcaaacggacaattttgctcttcgagttttgcagcctctgtgaaaatattcataccaacctcaatggatatcctttcagtaacccggaatacccgggccgctaattcacaaatctgcgcgcgattgcaggatgttcttgtatatcgcccagccagattgcctctacgtcgtgttgttgcagcggttgaaggagctcgctttgtgcaatcgcattctcacattgagaaaaacggttaatgaaccagactcgccgacaaccttgcggtacgtttttaaacgccccctgagggtggcgaaccagcgcaacgagatcgctcagttgcaaggttgcatcaggtgttaacccggtaatatcagcaaactgcgaccagcgatggacattttctgtgctcactttcgcgcccaaagtatgtcctcccatcacagcaatcacgcagcaactgcttttgggtatgcaaggttcgtgctcatcaggcgcttttaacggcattccacgcgagccatctgcttcaatgagaattacgtcacactctggtcgttgcaccagtgcatcaatcgcttctggcgtaaatccctgcacttttccctggttcgctttccagctgtgaaaacaaaatgaaatgggggatgtaagagacgcatgaggaagcatggcgggatcacgacagaaaaccacgggccagtgagacgttggcataaacatatgtgtcgtcgtcgtgattaacacacgcctgccgctagcctggagcagttctgccagccaaaaaagcaagctggttttccccccagcaccaacaacagaaatcacagtgggacgtttctgcgcacctaaatcaatgactaatgccgatgggtcaactatacttttcacgagtctttatgacctctctgggataaattatccccaacttaatccatcaggaagtaacgcaattatcaggcgttattagcccctataaataatggaaccactatgtcagccatcgactgtataattaccgctgccggattatcatcaagaatggggcaatggaaaatgatgttaccctgggaacagggaacaattcttgatacaagtatcaaaaatgcgttgcagttttgtagccgaattattttagtcaccggctatcgtggtaatgaactgcacgaacgttatgcgaaccagagcaatatcactattattcacaacccagattatgcgcagggtttactaacatccgtcaaggccgcagtacccgcagtgcaaacagaacattgttttctcacccacggtgacatgccaaccctcaccatcgatatttttagaaaaatctggtcgttacgaaatgatggcgcaatactgccactccataatggcatccccggccatccgattttagtgtcaaaaccatgcctgatgcaggcaatccaacgacccaatgtcaccaatatgcgtcaggcactccttatgggagatcattattccgtcgaaatagaaaatgcagaaataattttagatattgatactccggacgactttattacagcgaaggaaaggtatactgaaatttagaaaacgtagttaaacgattgcgttcaaatatttaatccttccggcactcattatcataatgataaggaatcactgattttgagaaaagagaaaaattgataaatgggctggcaataataattttcaggagtgattttaattctcatttagcacctgtgagttcattcacaaaaagcccttaagtttcgagccgcctcacatttttttatatttcccgccaaacctggcaagagtggtgcgattgttgctctatccccctaaaccaccggatttctcaacaccggtcactcaatgatatctgtataagctaaggagagggttatgggggatattatgcgtcccattccgtttgaggaacttttgacgcgcatatttgatgaataccaacaacaacgctcaatctttggtattcccgagcaacagttttactcacctgtaaaaggtaaaactgttagcgtcttcggtgaaacctgtgccactcccgtcggccctgccgctggcccgcacacgcagctcgcgcaaaatattgtcacttcctggctgactggcggacgcttcatcgaactaaaaaccgtccaaattcttgaccgcctggagctggaaaagccctgtatcgatgccgaagacgagtgctttaacaccgaatggtctaccgaatttaccctgcttaaagcctgggatgaatacctcaaagcctggtttgccctgcaccttctcgaagcgatgttccagccttctgattccggtaaatcgttcatctttaatatgagcgtcggttacaacctcgaaggtattaagcaaccgccgatgcaacagttcatcgacaatatgatggacgcatctgaccatccgaaattcgctcaatatcgcgatacgctgaataaattactccaggatgacgcatttttagctcgccacggattgcaggaaaaacgcgaaagcttgcaagccttacccgctcgcatccccaccagtatggtgcatagcgtcaccctctccaccatgcacggctgtcctccgcatgaaatcgaagccatttgccgctacatgctggaagaaaaagggctcaacacctttgtgaaacttaacccgaccttactggggtacgcgcgtgttcgtgagatcctcgatgtctgcggtttcggttacataggcttaaaagaagagtcatttgatcacgacctcaagctgacgcaagcactggaaatgctggaacgcctgatggcactggcaaaagaaaaatcactcggctttggcgtaaaactgactaacactctcggcaccatcaacaataaaggcgcactgcctggtgaagagatgtatatgtcaggccgtgcgctgttcccgctctccatcaatgttgcagcagttctctctcgcgcctttgacggcaaactgcccatttcttattccggtggtgccagtcagctgactatccgcgatatttttgatacaggtattcgccctattactatggcaaccgacctgctgaaacctggcggctatctgcgcttaagtgcctgcatgcgcgagctggaaggctccgacgcctggggacttgaccatgttgacgtcgaacgactgaacagactggcagcagatgcgttaaccatggaatacacccagaaacactggaagccagaagagcgtattgaagtggcagaagacctgccgctgaccgactgctacgttgccccctgtgttactgcctgcgctatcaagcaagatattccggaatacatccgtctgcttggcgaacaccgctatgccgacgcgctggaactcatctaccaacgcaacgctctgcccgccattaccggtcatatttgcgatcaccagtgccaatacaactgtacccgcctggattacgacagtgcgctgaatatccgcgaactgaaaaaagtcgcgctggaaaaaggttgggatgaatataagcaacgctggcacaaaccagccggttctggttcacgccatccggttgccgtgattggtgcaggtccggcgggtctggcagcaggttacttccttgccagagcgggccatccggttacgctgtttgaacgcgaagccaatgcgggcggcgtggtgaaaaatatcattcctcagttccgtattcctgcagagttaattcagcacgatatcgattttgttgccgctcacggcgtgaaatttgagtatggctgctcacccgatttaaccattgagcagttaaaaaatcagggcttccactatgttctgattgccaccggcactgataaaaatagcggtgtgaaactggcgggcgacaaccaaaatgtctggaaatcactccccttcctgcgtgaatacaacaagggtacagcgctcaagctgggcaaacatgtggtcgttgtcggggcgggtaacaccgcaatggactgcgctcgtgcggcgttacgcgttccaggcgtagaaaaagcaacgatcgtttaccgtcgttcactacaagagatgcccgcatggcgcgaagagtatgaagaagcgttgcacgacggcgtagagttccgtttcctgaataatccggaacgtttcgatgctgatggcaccttaaccttgcgcgttatgtcgcttggcgaaccggatgagaaaggtcgtcgtcgtccggttgaaaccaatgaaacagtaacactgcttgtagacagcctgatcaccgccattggtgaacagcaggatactgaagccctgaatgcgatgggcgtgccgctggacaaaaacggctggccagacgtcgaccataatggcgaaactcgtctgactgacgtctttatgatcggcgacgtacagcgcggaccatcctccattgtcgctgctgtcggaaccgcgcgtcgggcgaccgatgccatccttagtcgggaaaatatccgttcccaccagaacgataaatactggaacaacgtcaatccagcggaaatctatcaacgtaaaggcgatatctctatcacgctggtgaacagtgacgatcgtgacgcgtttgtcgcccaggaagccgctcgctgcctcgaatgtaactacgtttgcagcaagtgtgtggatgtctgcccgaaccgcgccaacgtctccattgcggtcccaggcttccagaaccgtttccagacgctgcacctcgacgcttactgtaacgaatgcggcaactgcgctcagttctgtccgtggaacggtaaaccgtacaaagacaaaatcaccgtcttcagcctggcgcaagactttgataacagcagcaacccaggcttccttgtggaagattgccgggtacgagtacgtctgaataaccaaagctgggtgttaaacatcgacagcaaaggtcagtttaacaacgtaccaccggagctgaacgatatgtgccgcatcatcagccatgtccaccagcatcatcattatctgctgggccgcgtggaggtgtaatcatgttgattctgaagaatgtcactgcggtacagctacacccggcaaaagtgcaggaaggcgttgatatcgccatcgaaaacgatgtgattgtcgctatcggcgatgccctgacgcaacgctaccccgacgccagcttcaaagagatgcatggccggattgtgatgccagggattgtctgctcgcacaaccatttttactcggggctttcccgcggaattatggcaaacatcgccccttgcccggatttcatctcaacgctgaaaaatctctggtggcggctcgatcgcgcccttgatgaagagtcgctctattacagcggactgatttgttccctggaagcgattaagagcggatgtacatcggttatcgatcaccatgcctctccggcgtatatcggcgggtcgctctccacattgcgcgacgcatttttaaaagttggcctgcgcgcgatgacctgttttgaaactactgaccgtaacaacggcatcaaagagttgcaggaaggtgtagaagaaaacatccgtttcgcccgtttgattgatgaggcgaagaaagcgacaagcgagccgtatctggtggaagcacatatcggtgctcacgcgccgtttaccgtgccggatgccggtctggagatgctgcgtgaagccgtgaaagccacaggccgtggtttgcatattcacgctgcggaagacctttacgacgtttcctacagtcaccactggtacggcaaagacctgctggcacgactggcgcaattcgatctcatcgacagcaaaacgctggtcgctcatgggctgtacttgtcgaaagatgacatcaccctactcaatcagcgcgatgcgttcctggtgcataacgcccgttcaaacatgaacaaccatgtcggctacaaccatcaccttagcgacatccgcaatctggcgttgggaacggacggcattggttcggacatgtttgaagagatgaaatttgccttctttaaacatcgcgatgcgggtggtccgctgtggcctgacagttttgccaaagccctgactaacggtaacgaactgatgagccgcaactttggcgcgaaatttgggcttctggaagccggttacaaagctgatttaaccatttgcgattacaactcgccgacgccgctgctggcagacaatatcgccgggcatatcgctttcggtatgggctcaggcagcgttcacagcgtgatggtcaatggtgtgatggtctatgaagaccgtcagtttaacttcgattgcgattccatttatgcacaagccagaaaagccgctgccagtatgtggcgtcggatggatgcgctggcataaatgacagatgccctcttcccgcagggaagagggttaaataaggaaagaagatgattgaacaatttttcaggcccgactctgtcgaacaggcgctggaactgaagcgccgctaccaggatgaagccgtctggttcgccgggggcagcaaactcaatgctacaccaacccgtaccgataaaaagattgccatttccttacaggatctggaactggactgggttgactgggataacggtgcactgcggattggcgcaatgtctcgcttgcagccactgcgtgatgcgcgatttattcctgcagcgctgcgtgaagccctcggttttgtttactcacgccatgttcgtaatcagtcgaccattggtggtgaaatcgccgcccgccaggaagagtcggtgctgcttcccgtcctgttggcactggatgctgaactggtttttggcaacggcgaaacgctgtcaatcgaggactacctggcctgcccatgcgatcgcctgctaaccgaaattatcattaaagatccgtatcgcacctgtgcgacccgcaaaattagccgttctcaggcaggtttaaccgtcgtgacggcagccgttgcaatgacagaccacgacggtatgcgaattgcgctggatggcgtcgccagtaaagcactgcgtctgcatgatgtcgaaaaacaaaatctggaaggcaatgcacttgaacaggctgtcgccaacgccattttcccgcaggaagatttgcggggcagcgtggcctataaacgctatatcacgggagttctggtagccgacctgtatgccgactgccaacaggctggggaggaagccgtatgatcatccactttactttaaatggcgcgcctcaggagctaaccgttaatccaggcgaaaacgtgcaaaagctgttgtttaacatgggaatgcactctgtacgcaacagtgatgatggtttcgggtttgccggttctgacgcaataatctttaacggtaatatcgttaacgcgtccttgcttattgccgcacagttagagaaggcagatattcgtaccgcagaatctctgggcaaatggaacgagttaagtctggttcaacaggcaatggttgatgttggcgtggtgcagtctggttataacgatccagctgcagctctgattatcaccgatcttctcgatcgcatcgccgcacctacccgcgaagagatcgacgacgcgctttctggtttgttcagccgcgatgctggctggcagcaatactatcaggtcattgaactggcggttgcacgtaaaaataatccgcaggccaccattgatatcgctccgactttccgtgacgacctagaagtcattggtaagcattatcctaaaactgatgccgcgaaaatggtgcaggcgaaaccctgctatgttgaagaccgcgtaacggctgacgcctgcgtcattaaaatgttacgtagcccacacgctcacgcactgattactcatctggatgtcagcaaagctgaagccttaccgggcgtcgttcacgttattactcacctgaattgcccggatatctactataccccgggtggtcagagcgcaccggaaccgtcaccgcttgaccgccgtatgttcggcaagaaaatgcgtcacgtcggcgatcgtgttgctgcggtcgtcgcagaaagtgaagaaattgcgctcgaagcactgaagctcatcgacgttgaatatgaagtgcttaagccggtaatgtcgatcgacgaagcaatggcggaagatgcgcctgtcgtgcacgatgaaccggtggtgtatgttgctggtgcgccagatactctggaagacgataacagccatgcagcccagcgcggcgagcatatgatcatcaacttcccgatcggttctcgccctcgcaaaaatatcgccgccagtattcatggtcatattggcgatatggacaaaggctttgccgatgccgatgtgatcattgagcgaacctataactcaacgcaagcgcagcagtgcccgactgaaacacatatctgctttactcgtatggacggcgatcgtctggttatccacgcctccacccaggtaccatggcacttacgccgccaggtcgcgcgcctcgtgggcatgaaacagcataaagttcatgtcattaaagagcgagttggcggcggttttggttccaaacaggacatcctgctggaagaagtgtgcgcctgggcaacctgcgtgaccgggcgtccggtactgttccgctacacccgtgaagaagagtttattgctaacacctctcgtcacgtcgcgaaagtcaccgtcaaactgggagcgaaaaaagatggtcgcctgacggcagtgaagatggatttccgcgccaacactggcccttacggcaaccactcactcaccgtaccgtgtaacggaccggcgctgtcgctgccgttatatccgtgcgataacgtcgatttccaggtcaccacctactacagcaacatttgcccaaatggtgcttatcagggttatggcgcaccgaaaggtaacttcgctatcaccatggcattagcggaactggctgaacagttacagatcgaccaactggaaattatcgaacgtaaccgggtacacgaagggcaagagctgaaaattctcggtgcaatcggtgaaggtaaagcgccgacctccgttccttccgccgccagctgtgcactggaagagatcctgcgtcagggtctcgagatgatccaatggtcgtcaccgaaaccgcaaaatggtgactggcacatcggtcgcggcgtcgccattatcatgcagaaatcgggtatcccggatatcgatcaggctaactgcatgatcaaactggaatcggacggcacctttatcgttcattctggcggtgcggatattggtactggtctggatactgtagtgacgaaactggcagcagaagtgctgcactgcccaccgcaggacgtgcatgttatctccggtgataccgatcatgcgttgtttgataaaggcgcatatgcctcgtccggtacttgcttctcgggtaacgcggcgcgtttggcagcggaaaatctacgggagaaaattctgttccacggcgcgcaaatgttgggtgagccagtggcagatgttcaactggcaacgccgggcgtcgtgcgcggcaagaaaggcgaagttagtttcggggatattgcccataaaggcgaaaccggcaccggctttggttcactggtgggaactggcagttatatcacgcctgatttcgccttcccgtatggcgcaaacttcgctgaagttgccgtcaacacgcgtacgggtgaaatccgcctggataaattctacgccttgctggactgcggtacaccggtcaatccagagttagcgttgggacaaatctacggtgccaccctgcgtgctatcggccacagtatgagcgaagagatcatttatgacgccgaaggtcacccgttaacgcgtgatttacgcagttacggcgcaccgaaaattggtgacattccgcgtgatttccgcgctgtgctggtgccgagcgacgataaagtcggcccgttcggggcgaaatcgatctcggaaatcggtgtaaatggcgcagctccggcgattgctaccgcaattcacgatgcatgcggcatctggttacgcgaatggcatttcacaccggagaaaatactcactgcgctggaaaaaatataaataataaatggccgcttcggcggcctgtttctctgtttgaacgatgactaaatagtgactgcgaaaatgagataagccgttctcaaggcgtcctgcgccccaaattcgtgggaatttattttactaattcagatgatcaaatttactttaaaaggagtgaagggatgtctgatataaaccatgcaggttctgaccttatatttgaactggaggatcgccctccctttcatcaggctctcgttggtgccattacccatctgttggcaattttcgttccgatggtaacccccgcgttaatcgtgggtgcggccttacagctttccgctgaaacaactgcctatcttgtttctatggcgatgatcgcctctggtattggtacctggttacaagtaaaccgctacggcatcgtcggttctggcctactctcaattcagtcagtcaatttttcatttgttacggtcatgattgcgctgggcagcagcatgaaaagcgacggttttcacgaagagttaatcatgtcgtcgcttctcggcgtctccttcgttggcgcatttctggttgtcggatcttcatttatcttgccctatttacgtcgggttattacgcctaccgtcagcggtattgtggtactgatgatcggcttaagcctgattaaagtcggcattatcgattttggtggaggatttgcagccaaaagcagcggtacgttcggcaattacgaacatctcggcgttggtttattggttttaattgtggtgatcggctttaactgctgtcgcagtccgttgctacgcatgggagggatcgccattgggctatgtgtcggctatatcgcatcgttatgcctgggcatggtggatttcagcagtatgcgcaatttgccgttaatcaccatcccgcatccgttcaaatacggctttagttttagcttccatcagttcctggtggttggcacgatttatctgcttagcgtgctggaagcagtcggcgatatcaccgccacggcaatggtttcccgccgccccattcagggggaagagtatcagtcccggctgaaaggcggcgtgctggcagatggtctggtttctgttatcgcctccgctgtcggttcattaccattaaccacgtttgcgcaaaataatggggttattcagatgactggcgtcgcttcacgttatgtcgggcgaaccatcgcggtaatgctggttatcctcggcttatttccgatgattggcggcttcttcacgaccattccctcggcagttctgggaggcgcaatgacgttgatgttttccatgattgccatcgcagggattcgcatcatcatcaccaacggtttaaagcgccgtgaaacacttattgtcgccacttctttaggtttagggcttggcgtctcctacgatcccgaaatttttaaaatattgccagcctctatttatgtattagttgaaaaccctatttgtgctggcgggttaactgcgattttattaaatattatcctccctggtggctaccgacaggaaaacgttctgcctggtattacctcagcggaagagatggattaacagtaaaggagtcaatgatgtcaggagaacacacgttaaaagcggtacgaggcagttttattgatgtcacccgtacgatcgataacccggaagagattgcctctgcgctgcggtttattgaggatggtttattactcattaaacagggaaaagtggaatggtttggcgaatgggaaaacggaaagcatcaaattcctgacaccattcgcgtgcgcgactatcgcggcaaactgatagtaccgggctttgtcgatacacatatccattatccgcaaagtgaaatggtgggggcctatggtgagcaattgctggagtggttgaataaacacaccttccctactgaacgtcgttatgaggatttagagtacgcccgcgaaatgtcggcgttcttcatcaagcagcttttacgtaacggaaccaccacggcgctggtgtttggcactgttcatccgcaatctgttgatgcgctgtttgaagccgccagtcatatcaatatgcgtatgattgccggtaaggtgatgatggaccgcaacgcaccggattatctgctcgacactgccgaaagcagctatcaccaaagcaaagaactgatcgaacgctggcacaaaaatggtcgtctgctatatgcgattacgccacgcttcgccccgacctcatctcctgaacagatggcgatggcgcaacgcctgaaagaagaatatccggatacgtgggtacatacccatctctgtgaaaacaaagatgaaattgcctgggtgaaatcgctttatcctgaccatgatggttatctggatgtttaccatcagtacggcctgaccggtaaaaactgtgtctttgctcactgcgtccatctcgaagaaaaagagtgggatcgtctcagcgaaaccaaatccagcattgctttctgtccgacctccaacctttacctcggcagcggcttattcaacttgaaaaaagcatggcagaagaaagttaaagtgggcatgggaacggatatcggtgccggaaccactttcaacatgctgcaaacgctgaacgaagcctacaaagtattgcaattacaaggctatcgcctctcggcatatgaagcgttttacctggccacgctcggcggagcgaaatctctgggccttgacgatttgattggcaactttttacctggcaaagaggctgatttcgtggtgatggaacccaccgccactccgctacagcagctgcgctatgacaactctgtttctttagtcgacaaattgttcgtgatgatgacgttgggcgatgaccgttcgatctaccgcacctacgttgatggtcgtctggtgtacgaacgcaactaataataaaactttaacatcctcgtgaggacatcattatgtctggagacatcctacaaacaccggacgcaccaaagccacagggcgcgctggataattattttaaaattaccgctcgtggcagtaccgttcgtcaggaagtactggctggcttaacgacctttctggccatggtttattccgttatcgtcgttccgggaatgctgggcaaagcaggttttcctcccgcagctgtgtttgttgccacctgtctggtcgcgggcttcggctcgttgctgatgggattatgggctaatttgccaatggcgattggttgcgcgatttccttgacggcgtttaccgcattcagtctggtactcgggcaacaaattagcgttcctgtcgcactgggcgcggtatttctgatgggcgtcatcttcaccgccatttccgtaaccggtgtgcgtacctggatcttacgtaatttgccgatgggtatcgctcacggtacaggtatcggtatcgggctgtttctgctgctgattgctgctaacggtgtgggtatggttatcaaaaacccgattgaaggcttgccagtggcgctcggtgcgtttacctccttcccggtgatgatgagcttgctggggctggcggtcatcttcggcctggagaagtgtcgcgtacccggcgggatcttgttggtgattattgcaatttcgatcatcggcttaatctttgacccagcggtgaaataccacggtctggtggcgatgccaagcctgactggcgaagatggtaagtctctgattttcagcctcgatattatgggtgcactccagccaactgtacttccgagtgtactggcattggtgatgaccgcagtgttcgacgctactggcaccatccgtgccgtcgccggtcaggcgaatttgttggataaagacaaccagatcatcaacggcggcaaagccctgaccagtgactcagtaagttcaatattctccggcctggtgggcgcagcgcccgcagcggtttatatcgaatcagcggcaggaaccgccgccgggggtaaaacaggtttaaccgcaaccgtagtgggggcgttattcctgttaattctgtttttatcaccgctgtcatttttgatccctggttacgccactgcacccgctctgatgtacgtaggtttgctgatgttaagtaacgtctcgaagctggatttcaatgattttattgacgctatggctggcctggtgtgtgccgtgttcatcgttctgacttgtaatatcgttaccggtattatgctgggctttgtgacactggtcgtaggccgcgtctttgcacgcgaatggcaaaagctgaatattggtacggtgatcattactgccgcactggtcgcattttacgcgggtggttgggcaatctaatagattctccgcgcctttcagcgcggagatttctttcagagaggattctcaccgctggcaacaatacgctgctggcggactcgcctgagttctctttcagtaagcaactgcagcgcctgtgttgggcaagattcaacgcaggctggcccctcttcccgctgttcacagagatcgcatttcacaatttgttgtcgggtatcccccggcaacgactgaatggtgatcattccaaacgggcacgcactgacgcaactctgacagccaatacaacgggcagaattggtctgcaccacctgctcgcccatcgtcagcgcccccacggggcaagcgccaacacaaggggcgttttcacactgatggcacatcaccggcgcactgatgctgtccagtcgctgtaccttcagccggggtaaaaagacatcggcattcaactcctgttctgaagggtgagcgaccacacaggctacttcacaagtacggcagccaatacagtcagccggattaacgataattaacgatttcatcacgatgccttcgtatcaaacagagttaacatatcgcgcgccgcctgccttcctgcggccattgcagtgacaaccagatccgcgccatgaactgcatcaccaccagcaaagacttttttcagatgcgtctgggtaggtaaatacccgacgtcaccggtttgaatcaggccccatttatcgagtttaattccgctgccctgcaaccacggcatggcatgcgcctggaaaccaaaggccataatcagaacatcggcgggcaattcaaactctgaacccgctaccggacgaggacgacggcgaccatccggccccggctcacccatggcggtacgaatcaggcccaccgcagttaaacgcccatcttcgtcacaagcgatatattgcggttgaacattgaactgaaactcgacaccttcctcgcgcgcattaaccacctctttgcgcgagcccggcatactgacttcatcacgacgatacgcgcaggtcacgctggcggcattgaggcggatggaagtccgcaaacaatccattgtcgtatcgccaccgcccaataccacgactcgcttaccttccacgtccgtcagcggatactcttcagactccggcaatcccatgagctggcgggtatgggcagtcaggaacggtagagcctgaatgacaccgggcgcatcttcatgcggcagatctgctcgcatcatcccgtaagtccccacgccgatgaaaactgcatcatattcagaagttaaatcgctaaaggtaatatcgcggccaatttcacagttaagatgaaagtcgattcccattgcggtgaatatctctcgccgctggcttaataccgttttatcgagtttgaaaggaggaatgccaaaagtcagcataccgccaatttctggatggcgatcaaagacatcgacctgaactcctgcgcgcgccagaatatcagcacaccctaaccctgcaggcccagcgccaatcaccgccactttttcgctacggggaacaactttgctgacatcgggacgccagcccatcgccagcgcggtatcggtgatgtagcgttccagattaccgatagagactgcgcccgagtgatctttcaaagtacatgcgccttcacaaagacggtcctgtggacataccctgccgcaaatttctggtaaggaactggtctggtggcaaagttctgccgcttcaataatctttccttcctgtaccagacggatgtaatccggaatagcgttatgcagcgggcaatgccagttgcagttagctttttcggcacaataaacacagcggtcactctcataagtcgcttgttgtggatccagcccgcaatatatttcgccaaagtgggttttccgttcactcgctgaaattttatctgcgcctttacgcgagttaacggggagcaacgctgcactgcgagatggctgagcgtctgatgacgcttttcctgctgccgttttgcgctggcgggccacctttatctgctgcaaccctttatcgtccatcagtcgtaacgcctgtgttgggcaaacttcaatacaggcttgcgtgccggaactgcgctggttacaaaggtcgcatttctgcgcaatcgtatcgaccatctcaacgacgccaaaggggcaagcgattgcgcatcttttacaaccaatacatttttgctcgtccagttgtacgctatcggactggaaagtcagagcattaaccggacaagccgtaacgcaaggggcattgttgcagtgatggcaggccaccggattcgcagcctggcctttccctacaacgtggatacgcggtcgaaagtcactgtgactcagcggccagttttcttgattgtgtgccaccgcacaggcaatttcacaagcatgacagcctatacattccgcagcttcagcagcaataaacttattcatttgcatccctttcatttaatgagttatgtcttctcaaatttcgcgatgcaataaacgggcatatattaggtagcatgaccgttttaattataattttgcgactgagttcaaattattgcccctcaatctatgccgctttcattatttcaacattgccgatcaaaagagcgctatccagataaaaacgattaaatgcgagagtgcgacatgccagaatgattaatgaaatatcaatatgagaaaattacagataattccattgtcaggttctcttctcattttcgtggtttaaccacgattatgtgattgcctccgcaattcctgtctctaactccccttcctcgcaaaaactggcactccacgagcatgtgtttagacagtttcattaacgtaaacggttgctttttactctggcgggcgaaaggagaaacactgatgagcgccatagattcccaacttccctcatcttctgggcaagaccgcccaactgatgaggttgaccgcatattatcaccaggaaagctgatcatactcggtctgcaacacgtccttgtcatgtacgcaggtgcagtcgctgttcctcttatgattggtgaccgactgggcctctcaaaagaagctattgcgatgctcattagctcggatctcttttgctgcgggatcgtcacattattgcaatgtatcggtatcggtcgctttatggggatccgcctgccggtgattatgtcggtgacctttgctgctgtaacaccaatgatagccattgggatgaacccggatatcggcctgctggggatatttggtgccactatcgccgcgggttttatcaccacattattagcgccacttatcggtcgcttgatgcctttattcccgccactggttaccggtgtggttattacttctatcgggcttagcatcattcaggtgggtattgactgggccgccggaggtaaagggaatccgcaatatggtaatcccgtttatttaggtatctcctttgccgtcttaatttttatcttgctcattactcgctatgcgaaaggatttatgtccaacgtcgccgtattactggggattgtatttggctttttactttcgtggatgatgaatgaagtcaatttatccgggctacatgatgcttcatggtttgcgattgttacgccgatgtcgtttggtatgccgattttcgatcccgtttccattctgaccatgactgccgtgttaatcatcgtgtttatcgagtcgatggggatgttcctggcactgggtgaaatagtcggtcgtaaactctcttcgcacgatattattcgcgggctgcgtgtcgatggcgtagggacaatgataggcggcacgtttaacagcttcccccacacgtcattttctcaaaacgttggcctggttagcgtgacgcgcgttcatagccgctgggtgtgtatttcttcgggaattatattaatcctgtttggcatggtgccaaaaatggcggtgctggtagcctccattccgcaatttgtgctgggcggcgctggtctagtgatgttcggcatggtactggcgacagggattcgaattctgtcgcgctgtaactacaccaccaaccgttacaacctctatattgtggcgatcagtctcggcgttggcatgactccgacgctctctcacgatttcttttctaagttaccggccgtactgcaaccgctgctacatagcggcattatgctcgcaacccttagcgccgttgtgctgaacgtcttctttaatggctatcagcatcatgctgagctggtgaaggaatccgtctctgataaagatttaaaagtcaggacagtacgtatgtggcttctgatgcgcaagctgaagaaaaatgagcatggagaataatatgaattttttaatgcgcgctatattcagtctgttgttgctttttactctctctattcctgtcatttctgactgtgttgcaatggccattgaaagtcgcttcaaatatatgatgctacttttttaaatggtttttacctgtcggcatccgctcaaaacgggcggttgtcgataaacgctcacttggttaatcatttcactcttcaattatctataatgatgagtgatcagaattacatgtgagaaattatgcaaacggaacacgtcattttattgaatgcacagggagttcccacgggtacgctggaaaagtatgccgcacacacggcagacacccgcttacatctcgcgttctccagttggctgtttaatgccaaaggacaattattagttacccgccgcgcactgagcaaaaaagcatggcctggcgtgtggactaactcggtttgtgggcacccacaactgggagaaagcaacgaagacgcagtgatccgccgttgccgttatgagcttggcgtggaaattacgcctcctgaatctatctatcctgactttcgctaccgcgccaccgatccgagtggcattgtggaaaatgaagtgtgtccggtatttgccgcacgcaccactagtgcgttacagatcaatgatgatgaagtgatggattatcaatggtgtgatttagcagatgtattacacggtattgatgccacgccgtgggcgttcagtccgtggatggtgatgcaggcgacaaatcgcgaagccagaaaacgattatctgcatttacccagcttaaataaaaaaccccgacatttgccggggttgtgagcataacgtaatgcttattttaccggacgcatcgccgggaacagaataacgtcgcggatggtatggctgttggtgaacagcattaccatacggtcgataccaattcccagacctgctgtcggcggtaagccatgttccagtgcggtgacgtaatcttcatcgtagaacatcgcttcgtcgtcacctgcgtctttcgcggcaacctgatccaggaagcgttgcgcctgatcttccgcgtcattcagctcgctaaagccgttaccgatttcacgaccaccaatgaagaactcaaagcggtctgtgatttccgggttaacgtcgttacgacgcgccagcggagaaacttctgccggatattcagtaatgaaggtcggctgaatcagatgtgcttctgccacttcttcgaagatctcggtaacgatacggcccagaccccagctcttctcaacgtggatgccgatagattcagcaattgctttcgcagagtcgaagttgtccagatccgccatgtcggtttccgggcgatatttcttgatcgcttcacgcatggtcagtttttcgaacggtttaccgaagtccagcgtcacgtcgccgtaggtcacttccgtcttaccgagaatatcctgtgccagagtacggaacagcgattcggtcagctcgatcagatctttgtaatctgcgtaagccatgtagagttccatcatggtgaactctgggttatgacgtacggaaataccttcgttacggaagttacggttgatttcgaatacacgctcgaagccaccaaccaccagacgcttgaggtacagttccggcgcgatacgcaggtacatgtcgagatccagcgcgttatggtgggtgataaacggacgcgcagcggcaccgccagggatcacctgcatcatcggcgtttcaacttccataaagccgcggttcaccatgaactggcgaataccagagaggatctgcgagcgcactttaaaggtgttgcgggattcatcgttggagatgagatcgagataacgctgacgatagcgcgcttcctgatcctgcaagccgtggaatttatccggcagcggacgcagtgctttggtcagcagacgcaactcggtgcagtggatagacagttcgccggttttggttttgaacagcttacctttcgcgccgaggatgtcgccgaggtcccattttttgaactgctcgttataaacgccttccgggagatcgtcacgggcaacgtacagctgaatgcgaccgccaacgtcctgcagggtaacgaaagacgctttacccataatacgacgggtcatcatgcggccagcaacggcgacttcgatgttcagcgcttccagttcttcgttctctttgccgtcgaattctgcgtgcaattggtcagaggtatgatcgcgacggaaatcgttcgggaaggcaatcccctgctcgcgcaggttcgccagcttctcacgacgcgttttcagttcattgttaagatcgactaccgcgtcagcgccctgtgcgtgttgttcagacatgttggttcctcataaccctgctttcaaacttgcttcgataaattgatccaggctgccgtccagcacggcctgcgtgttgcgggtttctaccccggtgcgcagatctttaatgcgggagtcatcaaggacataagaacgaatctggctgccccagccgatgtcggatttgttatcttccatcgcctgtttctcggcatttttcttctgcatctccagttcataaagcttcgctttcatctgcttcatggcctgatctttgttcttgtgctgggaacggtcgttctggcactgggtcacgatcccggtcgggatgtgggtaatacgcaccgcagattcggtacggttaacgtgctgaccgcccgcgccggacgcgcgataaacgtcaatgcgcagatccgccgggttgatttcgatatcaatatcatcatcaacttccggataaacaaacgcggagctgaacgacgtgtggcgacgaccgccggagtcaaacgggcttttacgcaccaggcggtgaacgccggtttctgtacgcagccagccgtaagcgtaatcgccggagattttgatcgtcacggatttaatacccgccacttcaccttccgactcttcgatgatttcagttttgaaaccacgcgattctgcccagcgcagatacatacgctcaagcatgctcgcccagtcctgtgcttccgtaccgccagaccccgcctgaatatcgaggtagcagtcggcgctgtcatattcgccagagaacatacggcggaactcaagctgcgccagtttttcttccagggcgtcgagttcagcaacggcttcgttaaaggtttcttcgtcgtcagcttctacagccagttccagcagaccagaaacatcttccagcccctgtttcatttggtcgagggtgtcgacaacggcttcgagggaggaacgctctttacccagcgcctgtgcgcgttcgggttcgttccagacatccggctgttccagctcggcgtttacttcttccagacgctctttcttggcgtcgtagtcaaagataccccctaagaacgtcggagcgttccgtgaggtcctgaatgcgattatttaccggattaatttcaaacatggtctgatttcttttattgagctagtcaaaatgcggtgataagagcgggattgtacccaatccacgctcttttttatagagaagatgacgctaaattggccagatattgtcgatgataatttgcaggctgcggttgccgcgaaactcgttgatatcgagcttataagccagttgcacttcgcgcacgccgttatccggccagagggcggtatcgacattaaaagcaataccatccagcagtggaccgccgccgaccggttcgaccatcaccttcaaatgacgttcgcccaccagccgctgttgcagcagacggaaatgaccgtcaaacagcggctccgggaacatctgcccccacgggccagcatcgcgcagcagctgcgccacttccatggtcatttcggccgggcttaacggaccgtctgataccacttcgccttgcaatagcgaagggtccagccactcagtaaccagttcgccaaaccgttgttgaaagagtttgaatttatcctcttccagcgacaaacccgccgccatcgcatgaccgccaaacttcagcatcatgccagggtagagtgtgtctaatcgctccagcgcatcacgcatatgcagcccctgaatggagcgaccggaacctttcagcgtaccgtcacctgctggcgcaaacgcgataaccggacggtgaaaacgctctttgatgcgcgaagccagaataccgacaacgccctgatgccattcggggtgatacattgccagcccgccgggtagcgtgtcacggctgcgctccagtttctcgcacagggtcagggcttcaatttgcattccttgttcgatctcttttcgcgtctggtttagcgcatcgagttcatttgccagcacgcgcgcttcgccgatgttgtcgcacaacaacagcgccacaccgacggacatatcgtccagtcgtccggcagcattgagacgtggccccagcgcaaaacctaaatcgctggcggcgagtttttgtgcatcacggtttgccacttcaagcagcgctttaatccccggacggcactttccggctcggatgcgactcatcccctgccaggtcagaatgcgattattagcgtccagcggcacgacgtccgccactgtccccagcgcgaccagatccagcagttctgccaggttaggaattgcgatgttacgctcatcaaaccagccctgatcgcgcaaaaaggtgcgcagcgccagcatcagataaaacgccacacccacgcctgccagtgatttcgacgggaaattacagtcgcgcaagttagggttaatgatcgcttccgctgcgggtaatgtgtcgcctggcaaatggtgatcggtaacaataaccgggatgcccaacgagcgagcgtgctcaacccccgcatgggaggaaataccgttatccaccgtgacaattaactgcgcgccacgggcatgggcctgatcgaccacttccgggcttaagccgtaaccgtcttcgaaacggtttggtaccaggtagtcgatattgctgcaaccaagcgagcgcatcgccagcacgcttagagccgtgctggtcgcgccgtcggcgtcgaaatcaccgaccacaataatccgcgttccttcgcgaaaagcgttgtaaaggatctcaacggccttttcgacgccgctcagttgctgccagggcagcatacctttaacactgcgttccagttcttgcgcactgcgtactccccggctggcgtataaacggcgcagcaagggaggcaattcagcgggcaagtctgccgtttcatcgacttcacggcgacgaagttgtatctgttgtttcacgcgaattatttaccgctggtcattttttggtgttcgtcgaggaattctttcatctctttcggcggctggtaacccggaacaagtgtgccattgctcagcacaactgccggagtaccgctaacgccaagctggacgccaagtgcgtaatggtcggcaatatccacgtcgcaactggctggtgcgacgcttttacctgccatcacatcatcaaacgctttgtttttatctttcgcacaccagatagctttcatttctttctctgcatcgctgtccagcccctggcgcgggaaagcaagataacgcacggtgatccccagcgcgttgtagtctgccatttgctcatgcagtttgtggcagtaaccacaggtaatatcagtaaacacggtgatgacgtgtttttcctgcggcgctttataaacgatcatctctttttcaagcgcattcaactgctttaacagcatcttattggtgacattgaccggagccgtgccactaacgtcatacattggcccctgaatgatatgtttaccatcatcggtgatgtacaacacgccgctgttagtcagaactgtcttcatgccagctacaggcgcgggctgaatatcgctgcttttgatgcccattttggctaacgtttgttgaattgccgcgtcatcagcctgagcaaagcctgaaaacgccgctaacaaagtaaacaacataaaacctttcttcataaatcttcccgttcttttcagacatcacgcccgcgggtgatgctgttgatgaagttgccgcagacgctcggtagcgacatgcgtataaatttgcgtggtggagagatcgctgtggcccagtagcatctgcaccacgcgtaaatccgcaccatgatttaataaatgagtggcaaaagcgtgacgcaacacatgcggtgacagcttttcgctgtcgatacccgccagcacagcataatgtttaatacggtgccagaaggtctgtcgcgtcatctgctgcgcacgctggctgggaaacaacacgtcaattgacacaccattcagcagccacggacgcccatgttccagataggtttccagccagtaaaccgcctcttcacctaacggcaccagacgctctttgttgcctttaccaatgacccgtaccacgccctgacgcaggctgatatcactcattgtcagtccgaccagttcagagacacgcagcccggtagcatacaacacttcaagcatggctttatcgcgtagctccagtggctgatcgattaatggtgcctgtaataaacgttcgacctgcgcttcgcttaaatcttttggcaaacgctggggcaatttcggtgaagcgagatgcgcactgggatcgtcttcacgaaacttttcgcgataaagatactggaacaatcggcgcactgcactcagcaaacgcgctgagctggtggctttatacccgccctccagccgttctgccagtaatgcctgcaaatcgtcactttgcgccgtcgccagcgtcaacccgcggtgatgcaaccactccaccatcattgacagatcgcgacggtaagcgttcaacgtattttcagccagatttttttccagccacagagcatcaagaaactgctcgatgcgtgccagatcctgtttcacttgcgccccttatggtcactcatttgatccattatgccttattgtgccgtgactaaagcgattctgatacactagccgcaaaagccacagcagaatcgagaagcttacgttatgaatatgggtcttttttacggttccagcacctgttacaccgaaatggcggcagaaaaaatccgcgatattatcggcccagaactggtgaccttacataacctcaaggacgactccccgaaattaatggagcagtacgatgtgctcattctgggtatcccgacctgggattttggtgaaatccaggaagactgggaagccgtctgggatcagctcgacgacctgaaccttgaaggtaaaattgttgcgctgtatgggcttggcgatcaactgggatacggcgagtggttcctcgatgcgctcggtatgctgcatgacaaactctcgaccaaaggcgtgaagttcgtcggctactggccaacggaaggatatgaatttaccagcccgaaaccggtgattgctgacgggcaactgttcgtgggtctggcgctggatgaaactaaccagtatgaccttagcgacgagcgtattcagagctggtgcgagcaaatcctcaacgaaatggcagagcattacgcctgatctcactgacggcttagcgcatatgctttgccgtcatctttatctttgcgtctcttgttgcaacaaaatccgccgtaaatcccgccattcagcttcgtccatgctgtcggctgccagccataaatgttgccgtttaccgccatcagaacgtaaacgcagcatcatgccgctcttaatcatccacggtgctttgacgatgctccactcctgcccttgccaacgcaaacgcccgtccatcaacaagcgaatttccccctggcgagcattaatacgccgctggctgcgaacgcaatcaaacaccaccagcgaaagtaacaccatccataacggggtgtaactgagtggccagggcatgagtaaaataacagcggcaaccagcccatgaatcagcaaggaaagccactgtgcgcgccaggagacgcgcaaatcagattgccacaggaccacgttcccggttccgtgtctggatgagtcggaccatcatttccagttctgcatcggccggtttaccgtgattcatcagccagttaaacaggtccggatcgtcacattccagcagacgaataaagatgcgtttttcgtcatcgcttaagctgtcgtactcatgttcgaaaaacggcatgattgaaatatcgagttcgcgcataccacggcggcatgcccaatgaatgcgggctttgttgttaatgtccatcttcttcctgtctcacgaaaatccagtacccggctattgtaacgtgtttttcgccttcttttacgggaatatcagtaaacaccatcgcgatcgcgaaattaattcacaacaattcaatggcttcatttttttggaagtcgcctcgcagaaggcacagatcgcgtagtgaaagcacttgcattgcctcatagctcttttaccattagtcattaatacgccgttaagcaactcaggactctattatggcttttacaccttttcctccccgtcagcctacggcttctgcccgtttaccgctgacgctgatgacgcttgatgactgggcgcttgccaccattactggcgcggacagcgaaaaatatatgcagggtcaggtgacagcagatgtcagccagatggcagaagatcagcacctgctcgccgcccattgcgacgccaaaggtaaaatgtggagcaatttacgtctgttccgcgacggcgatggctttgcatggattgaacggcgcagcgtgcgtgaaccgcagctgactgaactgaaaaaatatgcggtattctctaaagtgaccatcgcgccagacgacgagcgtgtgctgcttggtgttgccggttttcaggcgcgcgccgcgctggcaaatctctttagcgaactgccttcgaaagaaaaacaggtagtcaaagaaggcgcgaccactttgctatggtttgaacacccggcagaacgtttcctgatcgtaaccgatgaagctactgctaatatgctgaccgataaactgcgcggtgaagcggaactgaacaatagccaacagtggctggcattaaacattgaagcgggtttcccggtgattgatgccgccaacagcgggcagtttatcccacaggcgaccaatctccaggcgctgggcggtatcagctttaagaaaggctgttataccggacaagagatggtggcgcgagcaaaattccgtggtgccaataaacgtgcgctctggttgctggcaggtagcgccagccgactgccggaagctggtgaagacttagagctgaaaatgggcgagaactggcgtcgtaccggtacggtactggctgcggtaaaactggaagatggtcaggtcgtggtacaggtcgtcatgaataacgatatggaaccggatagcatcttccgcgtacgcgacgatgcgaatacattgcatatcgagccgctgccgtattcgctcgaagagtaaatctctttatcgcatcaggcatttatcgcctgatgcgacgctggcgcgtcttatcatgtctgggatttgatgcctttatcacaacagggacgaggcccgtagatcggataaggcgttcacgccgaatccggcagttgtgctccgatgcctgatgcgacgctggcgcgtcttatcaggcctacaaaggcatacccattacgcctgcccaatatacaaatagatcgccagaaagtggcacacactaccgccgagcacgaagccgtgccagatggcatggttgtatggaatgcgtttgcagacgtagaaaatcaccccgagcgaataaaccacgccgcctaccgccagtaaggtaacgctgcccgccgcgagcttaactgccatttcataaattaccaccagcgacagccagcccatcgccagataggtcaccagagataaaattttgaatcggtgcgcgatggtcagtttaaacagaatacccagcaatgccaggctccagataacaatcatcaacccgcgcgctaacggagaatccagccccaccagcaaaaacggcgtgtaggttccggcaatcaacaggtaaatagcgcaatggtcaaatttcttcagccacatttttgcccgttgatgaggaatggcgtgatagagcgtcgaagcgaggaacagcaggatcatactgccgccatagaggctgtagctggttatcgctgtggcgctggcattaagatccaccgcctgaaccagtagcaacaccagcccaacgataccaaacaccaacccaatgccgtgactgacgctgttggctatttcctctgccagtgaatatccctgcttaatgaggggcttctgaaccataacttactccggagaaacgtacacgcacatgtatacctctccagcgtaactgagaatagttccagtgaacacctgttagctaaaataaattctgatttgagactaatctcctaaaaatcatgaaattaaatgcgaaatttcaactaacaggcgtgagttcaatttaaagacatttaaattcaatcacataaaattgtgtctgaccgggatagatgtcagcaatgacttttttcagttcagtcagggtcatattttcctgctctgcatgtttttcagtcagcgtatccagcgttacggttgaggttgcggtgacttcaatcgtgcaaaaataaccgtcatcttcaaaacgtccgacacgaagcacatcacccgttttgaagtgcgattcagactcgtcgcggatggtgatggttttacgcccagccagaatgtcatcctggaaacgttgaaaaaaagtgatgtcgtttggctgcatggtactatttcctgtaagaattgactcatctggagcctatgatagtgaaaaaactcaccttaccgaaagatttcttatggggcggcgcagttgccgctcatcaggtcgaaggcggctggaacaaaggcggaaaagggccgagcatttgtgacgtgctgaccggtggcgcacacggcgtgccgcgcgaaatcaccaaagaagtcttgccaggaaaatactatccaaaccatgaagccgttgatttttatggtcactataaggaagacatcaagctatttgccgaaatgggcttcaaatgttttcgtacatccattgcctggacgcgcatttttccaaaaggcgatgaagctcagccaaacgaagaagggctgaagttctacgatgatatgttcgatgaactgctgaaatacaacatcgaaccggtgatcaccctctcccactttgaaatgccgctgcatctggtgcagcaatacggtagctggaccaaccgtaaagtggttgatttctttgtacgtttcgcggaagtggtatttgaacgctataagcacaaagtcaaatactggatgaccttcaacgaaattaacaaccagcgtaactggcgtgcaccgctgttcggttactgctgctccggcgtggtgtataccgagcatgaaaacccggaagagacgatgtatcaggtgctgcatcaccagtttgtcgccagcgccctggcggtgaaagctgcgcgtcgcattaacccggagatgaaagtcggctgtatgctggcgatggtgccgctctatccttactcctgtaacccggacgatgtgatgttcgctcaggagtcgatgcgcgaacgctacgtctttaccgatgtgcagctacgcggctattacccgtcctatgtgttgaacgagtgggagcgtcgcggatttaacatcaaaatggaagacggcgatctggatgtgctgcgtgaaggcacctgcgattatcttggtttcagctattacatgaccaatgcagtgaaggccgaaggcggcaccggcgatgcgatctctggttttgaaggcagcgtaccaaacccgtatgttaaagcatctgactggggctggcagattgatccagtaggtctgcgctatgcactttgcgaactgtatgagcgttatcagaggccgctgtttattgtcgaaaacggttttggcgcttacgacaaagtggaagaagatggcagcatcaacgacgactaccgcattgactacctgcgcgcccatatcgaagagatgaaaaaagcggtgacttacgatggcgtggatctgatgggctacacaccgtggggctgcatcgactgcgtgtcgttcaccaccgggcagtacagcaaacgctacggctttatctatgtgaataaacatgacgacggtactggcgatatgtcgcgttcacgtaagaagagctttaactggtacaaagaggtgattgccagcaacggcgagaagctttaagtcgatgaagtaccggatgcaatacttgttgcatccggtcagacaacttccctgttttatttcccgcccgccaaatcgataaaacttcccgtgacgtaagaggctttatcacttagtagccagacaatggcctgcgcgacctcttctgcctgtccaccacgctgcatggggatgttcgacttaacgcgatcgacgcgtccaggctcgccgccgctggcgtgcatttcggtataaataaaccctggccgcacgcagttaacgcggatcccctgcgcggcgacttccagcgatagtccggtggttaacgtatcaatcgcccctttcgatgccgcgtaatcaacatattcccctggcgaacccaaccgtgaggccaccgaagagacattgacgatagcgccgccactgccaccatttttaagcgccatgcgttttaccgcctcgcggcagcagagaaaatatcccgtcacgttggtggaaagtactcggttgattcgctctgcggtaaggttttcaacggtgcactgggtaaacaagatcccggcgttattgaccagcgctgctagcggttcatcgtgctgatcgattgctgtaaacatcgcaacgacctggttttcgtcgctgatatccgcctggagcacgaatgctttgccaccggcttgcgttattaagttcatcacttcctgcgccgcgtggaggttttgctgataattaaccgccaccgtatacccttcttgcgccaacagtaatgcagttgcccgcccgatgccgcgactgccaccagtcacaagtgctatagccatttgtttttccgagaaaaattaattcgttgacgtatctttgagattgctaacaaactggctcaatcttcaatgttggcacgcttttccccctcgccctttcagggagagggccggggtgagggtaaatattcgcgccagtgccggcctgttcccctcaccctaaccctctccccaaaggggcgaggggactgtctgagcacttttgtactttgtcatctgactaaaaaggcgccgaagcgcctttagaaaatagtcgaatcagtgaattactggtattcgctaatcggtacgcaggagcagaacaggttacggtcgccgtaaacatcatccagacgtttcactgtcggccagtatttgtctgccacacctgccgggaataccgcaacttcacggctgtacggatgcgcccactcggcgaccagttcgctctgaatgtgcggcgcgttcaccagcgggttatcttccagcggccagacaccggctttcacctggtcaatttctgcgcggatagccagcatcgcgtcgataaagcgatccagttccactttgctttcagattcagtcggttcaaccatcagcgtacccgccaccgggaacgacatcgtcggcgcgtggaaaccgtagtcgatcaggcgcttggcaatatccagctcgctgatgccggtttcttctttcagcgggcgaatatcgagaatacattcgtgcgccacgcgaccgtcgcgaccggtatacagcaccgggaaggcatcctgcaggcggctggcaatatagttggcgttgaggattgccacctggcttgcttttttcagcccttctgcgcccatcatgcggatgtacatccagctgattggcaggatagaggcgctaccgaacggtgccgcagaaaccgcgccctgacgggttaacatgccttcgatttgcaccacgctatgacccggtacaaacggtgccaaatgcgctttcacgccgatcggtcccatacccggaccaccaccgccgtgcggaatgcagaaagttttatgtaggttaaggtgtgaaacgtccgcaccaataaagcccggcgaggtgatgccaacctgggcgttcatgttcgcgccatcaaggtaaacctgaccgccgaactgatgcacgacttcacacacttcacggatcgtttcttcatacacgccgtgggtagaaggataagtcaccatgatacaggagaggttatcgcccgcctgttccgctttcgcgcgcagatcagtcagatcgatgttgccgtttttatcacacgccacaaccaccacctgcattcctgccatatgtgcagaagcggggttagttccgtgcgcagaagccgggatcaggcagatatcgcgatgcccttcgttgcggctttcatgataatgacgaatcgccagcaggcccgcgtattcgccctgtgcgccagagttcggctgcatacaaacggcgtcgtaaccggtcagtttcaccagccagtcagccagctgcgcaatcatctgctgataaccttcggcctgctccggcgggcagaacgggtgcagttcggcaaattccggccaggtgattgggatcatctcggcggcggcgttcagtttcatggtgcaggaacccagcgggatcatcgcctgattcagcgccagatctttacgctccagcgagtgcatatagcgcatcatttcggtttcgctgtggtagcgattaaacaccggatgggtgaggatttcgtcgtcgcgcagcatcgcaggctggatagagcggctgtcgtgagccacgtctttgtccagcgtgtcgatgtccaggccgtggttatcgcccagcagcacgttgaaaagctgcattacgttttcacgcgtggttgtttcatcaagggtgatcccaaccgcgttcagaatatcgctacgcaggttgatttcagccgcttcggcacgcgtcagtacgcccgctttgtcggccacttccacacacaaggtgtcgaaatagtgcgcatggcgcagtttcagacctttttgttgcaggcccgccgccaggatatcggtcagacggtgaatgcggttagcgatacgtttcaggccaaccgggccgtgataaacggcatacaggctggcgatgtttgccagcagtacctgggaagtacaaatgttggagttcgctttctcacggcggatatgttgctcgcgagtctgcatcgccatgcgcagcgcggtattgccagctgcatctttcgatacaccgataatacggcccggcattgagcgtttgtattcatctttcgccgcaaagaatgccgcgtgtgggccaccgtagcccatcggcacgccgaagcgttgcgccgaaccaaaaacaatatccgcgccctgtttacccggcgcagttaacagcaccagcgccataatatcggcggcaacgctgaccacaattttgcgtgatttcagttcgctaataagcgcagtgtagtcgtgaatttcaccggtagtgcctacctgctgtaacagcacgccgaagacgtcctgatggtcgagcactttttgcgcgtcatcgacaatcacttcaaaaccaaaggtttcggcacgagtacggaccacatccagcgtttgcggatgcacatcggaagccacgaagaagcggttggcatttttcagtttgctgacgcgtttcgccatcgccattgcttcggcggcagcggtggcctcgtccagaagagaagcagaggccatatccagtccagtcaaatccagcgttacctgctggaagttgagcagtgcttcaaggcggccctgggagacttcaggttgatacggagtgtacgcggtataccagcccggattttccagcatgttacgcaggataaccggcggtagctgcacggcggtgtaacccatgccgatgtaagacgtgaagcgtttattgcgactggcaatagccttgagttctgccagtgcggcgtattcggtcgccggtgcgccaacctgcggtggtgtcgcaagttgaatatctttcggcacaatctggccggtcagcgcgtttaacgattgtgcaccaacggcattcagcatttcttgctgttgcgcggcgtccggtccgatatggcgttcaataaaagcgccgctgttttcaagctggcttaacgtctgtgtcatgagcgatggttcctgaaacgtgcagtgaattgtgaacctctctccttacgaagagagtgagggtgaggcataaattttcctcaccctgatcctctcccgcagaagaggaataaagccgttactcgtcttctaacaatgcttcgtatgcggtcgcatccagcagtgattccagttcgctttcatcgctggctttgattttaaagatccagccgcctgcatacggttcgctgttcaccagttccggggaatcgctcagtgcgtcgtttaccgccacgatttcaccgcttactggcgcataaatgtctgacgccgcttttaccgattcggcaaccgcgcagtcatcgcccgcgctaaccgttgcgcccacttccggcaggtcaacaaacaccatatcgcctaacagctcctgagcatgttcggtaataccaacggtgtaagtgccgtcggcttctttacgcagccattcgtgttctttgctgtatttcagttctgctggtacgttgctcatcaatcaatctccaaaaaagtaaatcacgcgacggctttgccgttacgcacaaaaacaggttttgtcactttaaccggcatttcacggttgcgaatttgcacaatcgccgtttcgccaataccttccggcacgcgcgccagcgcaatgctgtaacccagcgtcggggagaaagtaccgctggtgataatgccttcatgctggttgccctgcgcatcggtaaagcgtaccggcagttcattacgcagcacgcctttttcggtcatcaccagaccaaccagtttttctgtaccatgctcacgctgcacttccagggcttcacgaccgataaagtcacgatctgccggttcccaggcgatggtccagcccatgttggcggctaaaggagagatggtttcgtccatctcctgaccataaagattcatgcccgcttccagacgcagcgtgtcacgcgcgcccaagccacatggcttaacacccgcttccaccagcgcacgccagaaatcggccgctttttcattgggcagcgcaatttcatagcccgcttcaccggtataaccagtggtggcaataaacagatcgcccgcctgcacgccaaagaacggtttcatcccttccaccgcctgacgctgggcgtcattaaacagtgtggcagcttttgcctgcgcattcggcccttgcacggcaatcatggaaaggtcatcacgaacggtaatttcgatgccgaaaggttcagcgtgttgggtaatccaggagaggtctttttcgcgggtggcggagttaacaacgaggcggaagaaatcttcagtaaagtagtagacgatgaggtcatctatcacaccgccagaggcattcaacatccccgagtaaagggctttgccgcttttggtgagcttcgccacatcgttcgccagcagataacgcagaaactcccgggtgcggctgccgcgaagatcgacgatggtcatatgtgacacatcaaacattccggcatcggtacgtaccgcatgatgttcgtcgatttgcgaaccgtaatgcagcggcatcatccagccgtggaaatccaccatgcgagcgccgcaaagcgtgtgttgttcgtacaaaggagtctgttgtgccatcttgtcctcattgaataagcggggctgacaactttttcatggtgaaattatcaccacgaaacccagcatcggagccactcccggtccccaacgcaatcgttctcttttgcctgaacttaccaccgaaacagactgttaaccataaggtaaaattgatcatcacattagcttatggttaaaaaatgcaaaaatcgcgacagaataaaaaaccaaaaaatacaccagtttctatacaaagatgatgtgatgagaaagtcaatttgaataagacaatattaagagctaaaaaaatgtcaaaaaacactaaatcaaaaaataatggcattagaaaatataatgcgaaaacggaggtgaaattagtttatttcaaatgaggaaaatctcccggcgaaaaaaccgggagatgaaagtgtgatgggtatcaaataaacaacagaggagaaatttttaacgcagccattcaggcaaatcgtttaatcccattgcctggcggataagttgcggcttaacgccaggaagcgtgtcggccagtttcaaaccaatatcacgcagcagttttttcgccggattggtaccggaaaacagatcgcggaatccctgcataccagccagcatcaacgccgcactgtgcttgcggctacgctcatagcgacgcagataaatgtactgcccgatgtctttcccctgacgatgcaaccgtttcagttcggcaatcagctctgcagcatccataaagccgagatttaccccctgccccgccagcgggtgaatggtatgtgcggcgtcgcccaccagcgccagacggtgcgaggcaaactggcgcgcataacgccccgtcagtgggaacacctgacgcgcgctctcaaccttgcataagcccaggcgattatcaaaagcgatatttaacgcgcgattaaattcgtcttcacttgcctgctgcatccgctgcgcttcctctggcgacagtgaccagacaatcgagcaaagatgcggatcgctaagcggtaaaaaggccagaatgccttcgccatggaaaacctgccgcgccaccgcatcatgcggttcttccgtgcgaatggtcgctaccagcgcgtgatgctgataatcccagaaagtcagcggaatatcggctttgttgcgcaaccaggaattagcgccgtccgcgccaatcaccagacgcgccgttaacatgctgccatctttcagcgtcaggaaggtttcattttctccccaggcgacctgctgtaattctgcgggggctaacagagtgatatctgacgactgatgcgctttgttccacagcgcgtagtgaatcactgaattttcaacgatatgcccaagatggctatagcccatgctttgatcgtcaaacgaaatgtgaccaaagctgtctttgtcccacacttccataccgtgataacagctggccctacgagagagaatgtcctgccagacgccaagacgggtgagtaatttttcgctggcggcattgatagccgaaacgcgcagttgtggtggtgcattcgccgccagaggttcctgtacgcgctgctccagtacggcaacgcgtaagccgctcccctgtaagccacaggcaaccgccagccccaccatgccgccgccaacaatggctacatcaacactttgcattgtttattccttaaaaccgccttcaacgcgccacccaaccgagggtgcgctgcgccagcacatcgcgtgccggggtgaataattccatcgtcatcagcccgatgttgcgcccgacaaccagcggtgcccaacggttggcaaaaagatgtacaaggctgtccgtgacgccaatggttgcttcgcgatcgctctgtcgacgctgctgataacggcacaatacgccgtaatcccccatgtcttctccgcgctcctgcgcctgagtcagggtttccgcaagactcatcacatctcgcataccgaggttaaacccttgcccggcaatcgggtgcagagtttgcgccgcattgcccaccagcacggtacgatgggtaatagatctggcggcgtgggttaacgccagcggataagcactgcgtttaccagcgtgggtaattttcccaagtcgccagccaaaggccgactggagttcacggcaaaacttctcgtcactccacgacaacacctcttcgcgccgttccagtggatgacaccagaccagcgaacagcgtccgtcagacatcggcaacatcgccagcgggccatgttgcgtaaagcgttcaaaagcgcgcccttcatgcgcaacggaagtagcaacgttggcaatcacggccagttgttcgtaaggctcctgctgccagtcaacgccgcacgcggtggctaacgctgaatgggtgccatcagctgctaccagcacgcggcccgtcagcgtctcgccactctccagcgtcacttcaacgtgactctgagtacgggcaacgttagccacgcgatcagggcaatgcagcgttacgccaggtgctttacgcagcaatgcaaacagccgttgcccgacattgtgcaattcgacaacctgtcccagcgccgccagttggtaatcttctgcggcgagggtgacaaatccagcgtgaccacgatcgctgacatgcacggtggtgatggcagttgcgcaatccgccagagattgccagacgccgatgcgcgccagttgctgacaggtacccgccgccagcgctatcgctcgtccatcaaagcccggatgagcatgtgactctggcgcagtcgcttcaatcaaatgtaccggcagcgccccgtgacttaaccgggaaatagccagcgccagcgtcgcgcccgccatgccgccaccgacgatgattacgctcattgctttctcgcagcaaccatcaacgcttcgatttcttccggctttttcaccacgctggcggtgaggttttcgttaccggtttcggtaatcacaatgtcgtcttcaatacgaatgccgataccgcgatattgttctggcacttctgcatccggcgcaatatacagccctggctctacggtcagtaccatgcccggttccagaatgcgcgagcgatcctgaccataaacacccacgtcatggacatccagtcctaaccagtggctaaggccatgcataaagaaaggacgatgggcgttctgagcgatcagttcatcaacatcacctttcaggatgccgagttttaccaggccgctaaccatgatgcgcaccacttcaccagtgacttccagaatggaagttcccggacgatacaggcgcaggctggtttcgagagactccagcacaatgtcgtagatttcacgctgggcctgggtgaatttgccgttgaccgggaaggtgcgggtaatatcgccagcgtaacctttgtattcacaacccgcgtcaatcaacaccaggtcgccgtcgcgcatttcacactcgttttcggtgtagtgcagaatgcagccgttttcaccgctgccgacaatggtgttataggacggatagcgcgcaccgtggcggttaaattcgtggtgaatttcgccttccagatggtactcgaacattcccggacggcatttttccatcgcccgtgtatgtgccatggcggtgatttctcccgcgcggcggagtacggcaatctcttctggcgatttgaacaggcgcatttcatgaacaacaggacgccagtcgatcatcgttgccggtgcggtgagattttgccgcgaacctttacgcagtttttccagcgcactgttcacgattacatcagcatatgcatattcgccctgggcatggtaaaccacatccaggccgttaagtagttgataaagttgctgattgatttcgctgaatgccagtgcgcggtcaacgcccagtttctctggcgcggcatcctggcctaagcgacggccaaaccagatctccgccgtcaggtcgcgaacgcggttaaacagaacgctgtggttatgagtgtcatcgcttttaatcagcaccagcaccgcttccggttcgttaaagccggtgaagtaccagaagtcactgttctgacgataggggtattcgctgtcggcgctacgtgttacttctggtgcagcaaaaatcagcgcggcgctgccgggttgcatttgctccaccagggcctgacggcgacgctgaaactcttgccgggatatctcactcataacactctccttacgttttttgtttttagtgtagagtcggtttttgtacttctggcgcggtcggttgcggatgagtaaaggtgtcgtggcataacagcgcggcaacacgaacgtattcgatgatctcttcaagcgacatttcaagctcttcctgatcttcgtcttcgtcgtaacccagttgcgcaatgttacgcagatcgtcgatagcttcaccggtttcgccggtcactttatccagcttcggttgcgtaacgccaagaccaagcaggaagtgattgacccaacctgccaatgcatcagcccgatcgaaaacgctgacatcatcgccatcaggcagataaagctgaaaaaggaagccgtcatcctgcagggcatcgctggtggcagagtgcattttacgcagtgcctgtgccagctcatgaccgaaagccatgccttcgttcgtcaggtcgtgaagtagcggtagccatgagctgtcatcgttaccgccacatatcatcccgctgattaaaccatgcatctcagctggggtcagacccgtcccttgttggttcagatactggttcatttcgttgtaaccaggcatttcgttctgtatagacataagcattcgtcgtcaaagggaggaatattcatgatatgctaccactttgggccctggtggaccagaaaagggcttgtctcttctcatcagggtagctatagtgtcgccccttcgcagaccatgggtctaaagacgaaggcagcgcagtcaatcagcaggaaggtggcatgtctgcacaacccgtcgatatccaaatttttggccgttcactgcgtgtgaactgcccgcctgaccaaagggatgcgttgaatcaggcagcggacgatctgaaccaacggttgcaagatctgaaagaacgcactagagtcacaaatactgaacagttggtcttcattgccgcattgaatatcagctatgagttagcgcaagaaaaagcaaagactcgtgactacgcggcaagtatggaacagcgtattcggatgctgcagcagaccatagaacaagcgttacttgaacaaggtcgcatcaccgaaaaaactaaccaaaactttgaatgacacttttcggtttactgtggtagagtaaccgtgaagacaaaatttctctgagatgttcgcaagcgggccagtcccctgagccgatatttcataccacaagaatgtggcgctccgcggttggtgagcatgctcggtccgtccgagaagccttaaaactgcgacgacacattcaccttgaaccaagggttcaagggttacagcctgcggcggcatctcggagattcccttcttatctggcaccagccatgacgcaactaccagaactcccactgacattatcccgacaagaaatccgcaaaatgattcggcaacgtcgtcgtgcgttaacgccggaacaacagcaggaaatgggtcaacaagccgctacccggatgatgacttatcccccggtggtgatggcacatacggtcgctgtattcctctcttttgatggcgaactcgacacccagccactcatagaacaactctggcgcgccggtaagcgcgtatatcttccagttttgcatccctttagtgccggtaatttgctgttcctgaattaccatccgcaaagcgaactggtgatgaacaggttgaagatccatgagccaaaattggatgtgcgtgacgtgctacccctttcccgattagacgtgctgatcacaccgctggtcgcctttgatgagtacggtcagcgcctgggaatgggcggtggtttttatgatcggaccttacaaaactggcagcactataaaacgcaaccggtgggttatgcgcatgattgtcagttggtggaaaaactccccgttgaagagtgggatatccctcttcctgcggtggttacaccgtcgaaagtctgggagtggtaagggcgatacacccgcatcgccctgattgacatcgttgattctttgacctaatttagtgagtaagggtaagggaggattgctcctcccctgagactgactgttaataagcgctgaaacttatgagtaacagtacaatcagtatgatgacaagtcgcatcataacccttctccttcaagccctcgcttcggtgagggctttaccgttacagccccatgctgccctgccatcgtaaatccccattaaataaacacaacgcattgatctgactttgatttattttctggagcagactcgcaaagtagaatgcgcaacgcggcaacggtgtggagaagggataaaaaacgggcaagtcagtgacctgcccgttgattttcagagaaggggaattagtacagcagacgggcgcgaatggtacccggaatagctttcattgcctgcagcgctttttcggcaacgtcttcgtcggcttcaatatcaataaccacataacccatctgggcggaagtttgcagatattgcgcggcgatgttgacgccctgctcggcgaagattttgttcagcgcagttagcacgcccggacggttttcgtggatgtgcatcagacgacgcccaccgtgcagtggcagcgagacttccgggaagttcaccgcagagagcgttgagccattgtcagaatacttgatcaatttacccgcaacttccaggccgatattctcctgcgcttcctgagtcgaaccgccaatgtgtggcgtcagaaggacgttgtcgaattcacacagcggagaggtaaatggatcgctattggtcgccggttccgtcgggaatacgtcgattgccgcccccgccagatgtttgctcgccagcgcatcacacagcgccggaatatccaccacagtaccgcgcgaagcattaatcagcagcgagccgggcttcattagtgaaatttctttcgcgcccatcatatttttggtggacggattctctggtacatgcagactcaccacatcgctcatattcagcaggtcagaaagatgctgtacctgagtggcgttgcccagcggcagtttattttcaatatcataaaagtaaacatacattcccagcgattcagccagaatgcccaattgcgtaccaatatgaccgtagccgatgatacccagctttttgccgcgcgcttcaaaagaacccgccgccagtttgttccacacgccacggtgcgctttagcattggcttccggcacgccgcgcaatagcagcagcagttcgccaatcaccagctccgcaacagagcgcgtatttgagaacggtgcgttaaataccgggatcccgcgctttgccgccgcatccagatcaacctggtttgttccgatacagaaacagccaatagcgaccagtttttctgcggcgttgatcacgtcttcagtcagatgggtacgggatcgcaggccgatgaagtgggcatcgcggatggattcttttaattgttcatcatccagcgcgcctttgtgaaattcgatgttggtgtaaccagctgcacgaaggctttccagcgccttttggtgcacgccttctaccagcagaaacttaatcttgtctttctccagcgatacctttgccatttacccaatcctgtcttttgaaatgttgtgtgcggatttgcatccgcctttcaacatatcaaaaaataatattgcggcaatatgaacgtttgcgtcgcgatgttgaggaaatatcacgcaaaggtaattcttggatgaatatgctggtttagaggatttatttagagcaatcgacaattgcctggtaaaagcgtgacacatgtcaccaaatttaatgaagagaatttttttaacgggggaggttcccccgtcagatcatttcacaatggttttgacaccgtcaggtgtgccaatcagcgcaacgtccgcgccacggttagcaaacaagccaacagtcaccacgccaggaatcgcatttatggcgttttccatcgctatcgggtcaaggatttccatgccgtggacgtcgaggatcacgttgccattatcggtcaccacgccctgacggtattccggacgaccgcccagtttcaccagctgacgcgccactgcactacgtgccatcgggataacttctactggcagcgggaatttacccagaatatcaacctgcttggaagcgtctgcaatacagataaatttttctgcaaccgaagcaatgattttttcacgggtcagcgccgcgccgccgcctttgatcatttgcatgtggccgttgatttcatctgcgccatcaacgtagatgccaaggctgtcgacttcgttgagatcaaaaacgtgaatgccgaggcttttcagtttttcagtggaagcatctgaactggaaacggccccttcaatctggcctttcattgtaccgagcgcgtcaataaagtgtgcggcggtggaacctgtacctacaccaacaatggtgccgggctgaacatactgaagtgccgcccatcctactgcttttttcaattcatcctgcgtcatgatcgtttcgcctgtggtatgaaatttcacacgcattatatacaaaaaaagcgattcagaccccgttggcaagccgcgtggttaactcatccataaaatatcgcgcaatggcaggcatcccctttcgccccgcaaataaagcatacaacggtctgggtatgccgctccacggtgcaaacaggcgcaccagttcaccgttcgcaagcccctgtttacaggcaaattgaggcaataacgccacgccattcaacacaaccagggcgcgaactcgctgagcgaaatgcattagcgcaaatccctgatcttttaagctgcgcttttaaccacggatacaaatgttacccgccgacggcttcggtatatgcaacctgacacaaaattgtgtcatagtgcaggaaaaagcatttaccaggagcagacaacagcaatgaaacgcccggactacagaacattacaggcactggatgcggtgatacgtgaacgaggatttgagcgcgcggcacaaaagctgtgcattacacaatcagccgtctcacagcgcattaagcaactggaaaatatgttcgggcagccgctgttggtgcgtaccgtaccgccgcgcccgacggaacaagggcaaaaactgctggcactgctgcgccaggtggagttgctggaagaagagtggctgggcgatgaacaaaccggttcgactccgctgctgctttcactggcggtcaacgccgacagtctggcgacgtggttgcttcctgcactggctcctgtgttggctgattcgcctatccgcctcaacttgcaggtagaagatgaaacccgcactcaggaacgtctgcgccgcggcgaagtggtcggcgcggtgagtattcaacatcaggcgctgccgagttgtcttgtcgataaacttggtgcgctcgactatctgttcgtcagctcaaaaccctttgccgaaaaatatttccctaacggcgtaacgcgttcggcattactgaaagcgccagtggtcgcgtttgaccatcttgacgatatgcaccaggcctttttgcagcaaaacttcgatctgcctccaggcagcgtgccctgccatatcgttaattcttcagaagcgttcgtacaacttgctcgccagggcaccacctgctgtatgatcccgcacctgcaaatcgagaaagagctggccagcggtgaactgattgacttaacgcctgggctatttcaacgacggatgctctactggcaccgctttgctcctgaaagccgcatgatgcgtaaagtcactgatgcgttactcgattatggtcacaaagtccttcgtcaggattaatccatcaaataatgcctgatagcacatatcaggcgttgtcctcacttctttttgtattccttgaatcacatcacaaaatagacaaatctcaggcggcaaaaaacgacgtctgaatgcattttttttgctggcgacaaacccacgtaaaaagctcaccgtaggcgcaaataccctcattttgattgcgttttacggagcaaataatgtctaacgtgcaggagtggcaacagcttgccaacaaggaattgagccgtcgggagaaaactgtcgactcgctggttcatcaaaccgcggaagggatcgccatcaagccgctgtataccgaagccgatctcgataatctggaggtgacaggtacccttcctggtttgccgccctacgttcgtggcccgcgtgccactatgtataccgcccaaccgtggaccatccgtcagtatgctggtttttcaacagcaaaagagtccaacgctttttatcgccgtaacctggccgccgggcaaaaaggtctttccgttgcgtttgaccttgccacccaccgtggctacgactccgataacccgcgcgtggcgggcgacgtcggcaaagcgggcgtcgctatcgacaccgtggaagatatgaaagtcctgttcgaccagatcccgctggataaaatgtcggtttcgatgaccatgaatggcgcagtgctaccagtactggcgttttatatcgtcgccgcagaagagcaaggtgttacacctgataaactgaccggcaccattcaaaacgatattctcaaagagtacctctgccgcaacacctatatttacccaccaaaaccgtcaatgcgcattatcgccgacatcatcgcctggtgttccggcaacatgccgcgatttaataccatcagtatcagcggttaccacatgggtgaagcgggtgccaactgcgtgcagcaggtagcatttacgctcgctgatgggattgagtacatcaaagcagcaatctctgccggactgaaaattgatgacttcgctcctcgcctgtcgttcttcttcggcatcggcatggatctgtttatgaacgtcgccatgttgcgtgcggcacgttatttatggagcgaagcggtcagtggatttggcgcacaggacccgaaatcactggcgctgcgtacccactgccagacctcaggctggagcctgactgaacaggatccgtataacaacgttatccgcaccaccattgaagcgctggctgcgacgctgggcggtactcagtcactgcataccaacgcctttgacgaagcgcttggtttgcctaccgatttctcagcacgcattgcccgcaacacccagatcatcatccaggaagaatcagaactctgccgcaccgtcgatccactggccggatcctattacattgagtcgctgaccgatcaaatcgtcaaacaagccagagctattatccaacagatcgacgaagccggtggcatggcgaaagcgatcgaagcaggtctgccaaaacgaatgatcgaagaggcctcagcgcgcgaacagtcgctgatcgaccagggcaagcgtgtcatcgttggtgtcaacaagtacaaactggatcacgaagacgaaaccgatgtacttgagatcgacaacgtgatggtgcgtaacgagcaaattgcttcgctggaacgcattcgcgccacccgtgatgatgccgccgtaaccgccgcgttgaacgccctgactcacgccgcacagcataacgaaaacctgctggctgccgctgttaatgccgctcgcgttcgcgccaccctgggtgaaatttccgatgcgctggaagtcgctttcgaccgttatctggtgccaagccagtgtgttaccggcgtgattgcgcaaagctatcatcagtctgagaaatcggcctccgagttcgatgccattgttgcgcaaacggagcagttccttgccgacaatggtcgtcgcccgcgcattctgatcgctaagatgggccaggatggacacgatcgcggcgcgaaagtgatcgccagcgcctattccgatctcggtttcgacgtagatttaagcccgatgttctctacacctgaagagatcgcccgcctggccgtagaaaacgacgttcacgtagtgggcgcatcctcactggctgccggtcataaaacgctgatcccggaactggtcgaagcgctgaaaaaatggggacgcgaagatatctgcgtggtcgcgggtggcgtcattccgccgcaggattacgccttcctgcaagagcgcggcgtggcggcgatttatggtccaggtacacctatgctcgacagtgtgcgcgacgtactgaatctgataagccagcatcatgattaatgaagccacgctggcagaaagtattcgccgcttacgtcagggtgagcgtgccacactcgcccaggccatgacgctggtggaaagccgtcacccgcgtcatcaggcactaagtacgcagctgcttgatgccattatgccgtactgcggtaacaccctgcgactgggcgttaccggcccccccggcgcggggaaaagtacctttcttgaggcctttggcatgttgttgattcgagagggattaaaggtcgcggttattgcggtcgatcccagcagcccggtcactggcggtagcattctcggggataaaacccgcatgaatgacctggcgcgtgccgaagcggcgtttattcgcccggtaccatcctccggtcatctgggcggtgccagtcagcgagcgcgggaattaatgctgttatgcgaagcagcgggttatgacgtagtgattgtcgaaacggttggcgtcgggcagtcggaaacagaagtcgcccgcatggtggactgttttatctcgttgcaaattgccggtggcggcgatgatctgcagggcattaaaaaagggctgatggaagtggctgatctgatcgttatcaacaaagacgatggcgataaccataccaatgtcgccattgcccggcatatgtacgagagtgccctgcatattctgcgacgtaaatacgacgaatggcagccacgggttctgacttgtagcgcactggaaaaacgtggaatcgatgagatctggcacgccatcatcgacttcaaaaccgcgctaactgccagtggtcgtttacaacaagtgcggcaacaacaatcggtggaatggctgcgtaagcagaccgaagaagaagtactgaatcacctgttcgcgaatgaagatttcgatcgctattaccgccagacgcttttagcggtcaaaaacaatacgctctcaccgcgcaccggcctgcggcagctcagtgaatttatccagacgcaatattttgattaaaggaatttttatgtcttatcagtatgttaacgttgtcactatcaacaaagtggcggtcattgagtttaactatggccgaaaacttaatgccttaagtaaagtctttattgatgatcttatgcaggcgttaagcgatctcaaccggccggaaattcgctgtatcattttgcgcgcaccgagtggatccaaagtcttctccgcaggtcacgatattcacgaactgccgtctggcggtcgcgatccgctctcctatgatgatccattgcgtcaaatcacccgcatgatccaaaaattcccgaaaccgatcatttcgatggtggaaggtagtgtttggggtggcgcatttgaaatgatcatgagttccgatctgatcatcgccgccagtacctcaaccttctcaatgacgcctgtaaacctcggcgtcccgtataacctggtcggcattcacaacctgacccgcgacgcgggcttccacattgtcaaagagctgatttttaccgcttcgccaatcaccgcccagcgcgcgctggctgtcggcatcctcaaccatgttgtggaagtggaagaactggaagatttcaccttacaaatggcgcaccacatctctgagaaagcgccgttagccattgccgttatcaaagaagagctgcgtgtactgggcgaagcacacaccatgaactccgatgaatttgaacgtattcaggggatgcgccgcgcggtgtatgacagcgaagattaccaggaagggatgaacgctttcctcgaaaaacgtaaacctaatttcgttggtcattaatccctgcgaacgaaggagtaaaaatggaaactcagtggacaaggatgaccgccaatgaagcggcagaaattatccagcataacgacatggtggcatttagcggctttaccccggcgggttcgccgaaagccctacccaccgcgattgcccgcagagctaacgaacagcatgaggccaaaaagccgtatcaaattcgccttctgacgggtgcgtcaatcagcgccgccgctgacgatgtactttctgacgccgatgctgtttcctggcgtgcgccatatcaaacatcgtccggtttacgtaaaaagatcaatcagggcgcggtgagtttcgttgacctgcatttgagcgaagtggcgcaaatggtcaattacggtttcttcggcgacattgatgttgccgtcattgaagcatcggcactggcaccggatggtcgagtctggttaaccagcgggatcggtaatgcgccgacctggctgctgcgggcgaagaaagtgatcattgaactcaatcactatcacgatccgcgcgttgcagaactggcggatattgtgattcctggcgcgccaccgcggcgcaatagcgtgtcgatcttccatgcaatggatcgcgtcggtacccgctatgtgcaaatcgatccgaaaaagattgtcgccgtcgtggaaaccaacttgcccgacgccggtaatatgctggataagcaaaatcccatgtgccagcagattgccgataacgtggtcacgttcttattgcaggaaatggcgcatgggcgtattccgccggaatttctgccgctgcaaagtggcgtgggcaatatcaataatgcggtaatggcgcgtctgggggaaaacccggtaattcctccgtttatgatgtattcggaagtgctacaggaatcggtggtgcatttactggaaaccggcaaaatcagcggggccagcgcctccagcctgacaatctcggccgattccctgcgcaagatttacgacaatatggattactttgccagccgcattgtgttgcgtccgcaggagatttccaataacccggaaatcatccgtcgtctgggcgtcatcgctctgaacgtcggcctggagtttgatatttacgggcatgccaactcaacacacgtagccggggtcgatctgatgaacggcatcggcggcagcggtgattttgaacgcaacgcgtatctgtcgatctttatggccccgtcgattgctaaagaaggcaagatctcaaccgtcgtgccaatgtgcagccatgttgatcacagcgaacacagcgtcaaagtgatcatcaccgaacaagggatcgccgatctgcgcggtctttccccgcttcaacgcgcccgcactatcattgataattgtgcacatcctatgtatcgggattatctgcatcgctatctggaaaatgcgcctggcggacatattcaccacgatcttagccacgtcttcgacttacaccgtaatttaattgcaaccggctcgatgctgggttaatgactcgtcccgtcacgatcttcagcaatatgctgaagcatcgtggcggtataacgatgatttctgattgaataaagatattcctgcatatacatcggcctgtgcggtgcatcaaaatatttcagcgttgccggattcaccagtcgccaggcaaaatgcgggatcaccgtcagaaaatgtccgcgctccacggcgctgattttggccataaaactgtagggacgataaataatggttggattgatcccacaaggtcgcatattcgcatcaatcattgcttcgaagttggcccggttctgaaagcgcatttgtagccagggcagctcctgaagcagctcttgctcttgtcgctcttcataacggcgagaaacgagaaagcctaatcgcagcggtggtagttcactgatagtcaggttttccagttcctgaactcgtgcagatacatgctgtggggagataataaaatctaactggcggtcaaaaagattatcgataacgccattttcgctgaactcaactggctgggcggtcacgccttcatacttatctccgagactaatcaactgatcgaaaataattgtcggataagtattatctatgccaatcacaatttctcgtgaacgacgccctgagttatggatttcattatcaatcgcagaaagccgttgataaaccgggaacagtttttgatacagttcctgtccggctttattgaggctgatattattatctttgcgggtaaatagcgtatagccaatttgttcttccagcgcggcaatgcttttaccaaatggcgaagccgtcatatggattttttctgccgcccgggcaatattattggtttgcgctaataaaatgaaattgcgcatctttttcgaaataaaaatgtccatccccctcccccgcatccttgtccgcttaaccgtttcagtcagcctatccttgatgaaaccgcgagcaaagataggtgattacgtcatggttttacagaaaattacagaaaaaggaggcaatatcgggtaaaggcattagcccgacgaatacgtcgggctaaaaatattattgtgctgcaggtgttttagcgggttgttgatccacaggttctaactggaagaccacatcgacctgatcatcaaactgaatagcggcctgctcgtaagtttcctgggcggacaccggcgcggcatcggctttcatcatccgcaccattgggctgggctgatagttggaaacatggtagcgcacgctatataccggccccagtttacgatgaaagccgttcgccagttcctgcgcctgatgaatcgcgttatcaatcgctgccttacgcgctttgtctttataggcatccggctgcgccacgcccagcgacacagaacgaatttcgttaagacccgccttcagcgcgccatccagcaaggaattcagtttgtctaactgacggagcgtgacttccaccgttctcacagcgcggtagcctttaaggatacttttaccatcctgataatcataatctggctgggtgcgtaagttcgctgagctgatatcttttttcgcgatctgattgagttcaaggaaggaaatgtattgtgcgacgcgctcatctgcctgtttcttggcagtagcggcatccttcgcggccacgttaacttcaatcgcaagagtggcaatgtctggcaccgcatccacgcttgccgtaccggaggtgacaatatgcggtccatccggcaattcgttagcctgcgctgccatcccgctaatacccattaatgccgccagggcgataactttgaacttcacgttagtctctccgtgttaattgacttgcccaaaattcaggacctctggaggcaagcttagcgcctctgttttatttttccatcagatagcgcctaactgaacaaggcttgtgcatgagcaataccgtctctcgccagctgcaaggcaataaaccacataacacatcccacaaccagattgataatgcgctgtgcttttgccgtgcgcagacgcggtgccagccaggctgcgagaagagccagaccaaagaaccacaggaaagaggcgctaattgtcccgagtgcaaaccagcgttttggttccacatcaagttgcccgccaaggctgcccagtacaacaaaagtatccaggtaaacatgcggattcagccaggtcactgccaacatggtggcgataattttccatctgccttgcttcatgacttcggcgctggctaactcaatattactgctcattgctgttttaaaagcgccaaaaccataccacagcaagaaggctacgccgccccaggtgaccagcgccagcaaccacggcgactgcatcaataacgcgctgccaccaaaaatcccggcgcaaatcaggaccaaatcgctgatagcacaaagtaaggcaatcataatgtggtactgacgacgtatgccctgattcatcacaaaagcattttgtggaccgagcggtaggatcatagccgccccaagtgcaagaccttgaaagtaataagaaaacacgttggatattccgaattaagtatctgatgcagagactatatcgcgggattgttattagcggaaattgataatattaattggcaatcagaaaaactaataagagagaggccagagagtattatctggcctcagcgttgattacgcagctttgtcttctttcacccgcttaaagttcacatccatttgcgggtacgggaagctgataccggcggcatcaaattcacgtttaatacgctccagcacatcccagtacacgttttgcagatcgccgctgttgctccagacgcggaccacgaaattaatcgacgatgcaccaagttcgttcaggcgcacagtcatttcgcgatctttcaaaatgcgatcttcagactggataatattggtcaggatctgcttaacctgatcgatatcggaatcatacgccacgccaataataaattcgttacggcgaactggctcgcgggagaagttaataatatttccggcaataattttaccgttcggaataacgataattttaccgtctgcagtacgcatggtggtggagaaaatctgcacactcagcacagtaccggctacgccgcccaggtcaacatattctccggcacggaacgggcggaacatgacaagtaacacgccagcggccaggttagacagtgacccctgcaaagccagaccaacagctaagcctgcggcaccgagtacagcaatgactgacgcggtttgtacacccacgcgtcccagtgcagcgattagcgtaaaggcgataataccgtaacggactaatgcagaaagaaaatcagcaacagtggcatcgattttacgggagatcatcaggcgattcaccgcgttggaaatcatccgcgcgataatcaaaccaacgatgatgatcgcgagtgccgccacgatgtttactgcataacttagcagcagcgcctggttagctaccagccagcttcccgcgccgtttatgctatcgacaacattcaaatcttccattcaatattccttttcaactgactcaaaatggagaaatacactccgccgccttatgacgggcagtctgacaagggtaaacaataaagcataattttgccaaatagatcacagatttctcatctgaatcaccttgcttttggcgaaaaaatccccgcagagcggggctcagacagatatcaatgtgcgctttgtcatgccggatgcggcgtgaacgccttatccggcctacaaaaacctgcaaattcaatatattgcaggatacgtgtaggcctgataagcgtagcgcatcaggcaattttgcttttggcgaaaaaaagacccgcagagcgggccttgagataagcagaaaggaatatcttacagaacgtcgatcgcgttcagttcctggaatgctttctccagacgagcgatcatcgaagtctgaccggcacgcagccatacgcgcggatcgtagtatttcttgttcggctgatcttcgcctttcgggttacccagctgaccctgcagataagcttcgttcgctttgtagtagttcagaacgccttcccaggttgcccattgggtatcggtatcgatgttcatttttactacgccgtagcttacggagtctttgatttcctgagcagtagaaccggaaccaccgtggaatacgaagttcaggctgttgtgcggcaggttgtgtttcttggaaacatattcctgagaatcacgcaggatggtcggagtcagaaccacgttacccggcttgtaaacaccgtgtacgttaccgaaggacgctgcgatggtgaaacgcgggctgattttgctcagttcggtgtatgcgtaatcaacgtcttccggctgggtgtacagtgcagaagcgtccatgtggctgttgtccacgccgtcttcttcaccaccggtgcaacccagttcgatttccagagtcatgccgattttggacatgcgctccaggtatttagagcagatttcgatgttctcttgcagagattcttcagacaggtcgatcatgtgagaagagaacagcggcttaccggtagctgcgaagtgtttttcacccgcgtccaacagaccgtcgatccacggcagcagtttcttcgcgcagtggtcagtgtgcaggataaccggaacaccataatgttcagccatctggtgaacgtgatgcgcaccagagatcgcgcccaggatagcagcaccctgcggaacgtcagatttcacgcctttaccagcgataaaggaagcaccaccgttggagaactgaacgataaccggcgctttaactttagcagcggtttccagtacggcgttgatggagtcagtaccgacgcagtttactgctggcagtgcgaagttgttttcttttgctacctggaaaactttctgtacgtcatcaccagtgattacgccaggttttacgaaatcaaaaatcttagacatgtctcttgtcctgtatcgtcgggccttatactcgtcatacttcaagttgcatgtgctgcgtctgcgttcgctcaccccagtcacttacttatgtaagctcctggggattcactctcttgtcgccttcctgcaactcgaattatttagagtatgaaaaattgcgtgctctaaaagcgcgctgaaacaagggcaggtttccctgccctgtgattttttacttcttagcgcgctcttcgagcatcgctactgcaggcagtactttaccttccacgaattcgaggaatgcgccgccgccagtggagatgtaggagattttgtcagcaatgccgaacaggtcgattgctgccagagtgtcgccgccgccagcgatggagaacgcttcgctgtctgcgatagcgttagccacgatttcagtacctttgcggaagttcgggaattcgaacacgccaaccggaccgttccacagaatggttttcgcattcttcaggatttcagccagttcctgagcggaagcatcaccgatatccaggatctgctcgtcagctttcacatcgttaacagatttcagggtagccggtgcagtttcagagaactcggttgctacgcgaacatcagacggaaccgggatgttgcaggtggtcagcagacgtttagcttcgtcaaccaggtcagcttcgtacagggatttacccacatcgtggccttgtgccgcgataaaggtgttagcgataccaccaccaacaatcagctggtcagcgattttagacagggagtccagaacggtcagtttggtagatactttagaaccaccaacgatagccaccatcgggcgagcaggttctttcagtgctttacccagcgcgtccagttcagctgccagcagcgggcctgcgcacgcaacgtcagcgaatttaccgataccgtgagtagaagcctgcgcgcggtgagcagtaccgaatgcgtccattacgaacacgtcacacagtgcagcgtattttttggacagggtttcgtcgtctttcttctcgcctttgttgaagcgaacgttttccagaacaaccagttcaccttcagcaacgtcaacgccgtcgaggtaatctttaaccagacgaaccgggttagacagtttgtctttcaggtagttaacaaccggcagcagagagaattcttcgttgtactcgccttcggtaggacgacccaggtgggaagttaccatcacttttgcgccttgtttcagggccagttcgatggtcggcagagaagcacggatacgcgcgtcgctggttactttcccgtcttttactggtacgttcagatccgcacggataaatacacgtttcccagcaagatccagatcggtcatcttaattacagacatggtgaatcctctcgttgattctaaaagttttgcagacgctgcttgcgtcttacctgaaagcaacagtagccatagctaacgtcgtgtcgagcattcggttagcaaagccccattcgttatcgcaccagaccaacgttttgatcaggtgtgcgccactgacccgggtttgggtgccatcgacaatggcactgtgcggatcgtggttaaaatctacagagaccaacggcaattccgtatagtcaactataccatgaaatgcaccttgtgctgctttttgcagcaacaggttgacttcattggcttttacaggtttcttcaccgtcacgcttaaatcgattgccgtcacatttatggttggcacacgtaccgcaatcgcttcaaagcgatcgttaaattgcggaaaaaatcgtgtgataccggcggccagtttagtatcgaccggaatgatcgactggctggctgcccgggtgcgacgcaggtcaggatggtatgcatcaataacctgttgatcgtgcatggcggagtgaattgtggtcacagtgccggactcaataccgtacgcatcatctaacaatttgatgacgggaattatgcaattcgtggtacaggaagcgttagaaacgatgcggtgttccgcacgaagttgatcctgattgacgccgtaaacaacggtcgcgtcgagatcgttactgccaggatgtgaaaagagcacttttttggccccggcggcaatatgcgcttcgccatgctcgcgggagccatatacgccggtgcagtcgaggactacatcaacgccaagttcacgccaggggagcgattgcagtgaacgttcatgcaatacgcggatggcgtcatcaccaacaaaaagttgatcgcgttcctgtcgtacttcccatgcaaaacggccatggctggtgtcatatttcaacaaatgcgccatgcccgcagcatccgccagttcgttgattgccaccacggtaatttccgcccggcgtccggattcatacaaagcacgaaccacattacgcccgatgcgaccgaagccatttatcgctacgcgtacggtcatagatctcctgcaaggttttccctgagcaaatttgccagacagagtaatccagcaaatcgtccggggaaaccttacctgtcgcaaactgcgactgattggttaattgtcgaacatttaatcgactgaaacgcttcagctaggataagcgaaacgtggaataaaaggaatgtttgtccagccgaagaagacatttatctgactcacatcacacttttatccccttttgtgggaagctttattccaggctggcgtaataataaccctacaataactggaataaattgtcagcttgtgaagtgataccggccttcttcagtcatctctactatcagattggcctgacggctattcatcagcacacgctcgacattggggccatcggtgcgggcataaaatgcttcggctacttgccgcgttaatcctcccgcaattttacgactaatcaagcgctcccgcagaatttgagcaggtgcatgaataaaaatagaaaaatcgcagaaagatgccaactccagccacttttcatcatccagtaacaaccagtttccttcgacgatgacgagtggtgcggtaacgtgcaacgcatcttcaacaggatcatgcttttgtcgatcgtactgcggccacgtacaatccccttccacgacctggcgcagattttccgtcagtttcgcaacgtcaaatgtctctggtgcgcctttgaaggggcgcaattgatgcgcatccagccagctattgtaatggtgaaaaccatccatcgggagcgtctgaatagcgggcagttccgggtcttgttgcgcgagatattcccagaaggtggttagggttgatttacccgtccccggcggagcgcaaagaaaaaccaccgtacgccgctgcggatttaccgtctgtaaggccgccaacatgtgcagcaacggtttatgtacattttcaatctcttcgttctggtactgtgcctgtatcttcagcccattcaccgttaattcaattttcacggcgttaattcctttaaggtggtcgttactgccagcgtcagcgccgttttgaccattccgctaaaacgcgcctctgaccagacggagaaatcagcgaacttcatcgcttttaacgcgtcatagagcatcgcattgcgggttatgctattgacgttgctgataaaatcccaggtcatgtcatcggcaaatccgggcgtttcatcctgttcgttcaggtaatgccagaactgggaaaaatgcgtgatatcggcgtacaaccatttatccattttccccaacgcataaatcaaacgcagtgcaacatcaatatcgtcaagcgggccgctttgggcgagtaacggcttcactgcatattcaacgatctcttcatcgttatcgacaaacagcgacggcagaaactggcgtatcccctggagcaaaatggtatgcgcagttttcataaatgaaaataaattgtcctgtgcatccagttgctcaagcacatcatcttctgtcagcgtcgccattggtcttccgatagatcaccatcaatgcagggagtctattatattacacgtttggtccgcgccgccgatcagtaatgtctgcgtccgcaccccattcgccgtctgttggataccgttcaccagctcaccgcccgtcacgcccgtagcgctaaagaggatatcgttccccctcaccagttcatcgagcgagtacacacggttaacgtcaacgcccattgccttgcaacgcttgcgctcctgctctgcaatctgccgattttccgtgtaatcccctttagcctggcaaaagtcaatcagctcggcctgcatatccccgcctaatgctttaacggcacaggcagaaatcacgccttctggcgcaccgccgatggtgtacatcacatcgtaaggattatcctgccagcaggtcagcacgctggcggcgacatcgccatccggcagggcaaaaaccttcacgcccagctgtgttgcttcctcaatcgcggcactcaggcgcggtttatccagcgtaaccatgcgcagcttatccagcggtttgcctaacgctttcgccacgttgcgcaggttgtccgtcagaggcaaagacagatcaatcgcgcccgccgccagccgattaacaaccagctttttcatatacatatcgggcgcatgtaacaggctatctcgaggggcgaaagccatgaccgccagcgcattgctctgccccatcgccaccatccgcgtgccttcaatgggatcaaccgcgatatcgacttctggcccatcgcctttgcccacctcttcgccaatccacagcatcggcgcatggtcaatttctccttcgccgataaccactcgtccacgaaaagcgacgtcgtttaatgcctggcgcatcgcggtgaccgccaggccatcaattttatttttgtcgccacatccggtttgcggccaggcagccaacgctgcctgttccgtaacgcgaaataatggccacgccagggacatcattgcgcggcctccccgatatcaacgccaaattgtgccagcagatatttctcggcctgttcattccagatgccgtgcgtttcctcaaccagccgcgccaactctttaaacagcggatcggttttgcctttttcggcaaaatcggcaatggcagtgagcggcatggtcacgccgttataaatgagttttttaccgccagggatatccggcagattgagcacggtttctggcaccgcatccaggccaccgatatgggtcaccataaacgacggctgtaactgcccagtggcgctaagggcaatcgcctctttcatgtcgtccgttgaaccgccagatgtaccgacgacgtgcgtgctgttgtaatggacgttgtagaaattaaacggcactttgaagtttttatccgtcggcccggcaaagaagttcagacagccatcttccgccagtaattcatcagccatctcaacgacagcaggcaccgccgcataaacaaaaatgtcatcgaacccggcatctcctgtcagcgcccgcagcatctggacaggatcgctcatccctttggtattcacatacaccagctcaatgcctttactggccgccagttccaccggcagcagcttctgtacctgcgccagacgtttgtcgtcgatatcgaccaccaccacccgcgacggttgtatgccgccgttaatggcgtaatcgatagcgccaatgcccatcggacctgcacacgccagcagtgcaatattgccgccaggtttgacgcccatgcgatgctcataaacatattgcgtggtgtgataattggcatgataagcaccaataatgcagcacataggctctgccagcgacgccgcagcaaaataagagccgtgatacggtaatacgcagcccaaattaatggcgatttcgggaataatcatataagtggcattgccgccaaaatattcgtagctgtagcccgctgaatatccgcttggtaaccccatcgccggttgcaatacaaaacgctggccttttttatatttgccagtgagatttttacccacttcgacaataaccccggcacattcatgcccggtaatgaccggatgattttctaaatcgtcgggtacgcgtttatgttcactaccgagtaacgccgctttccaggtcgataaacagacgctgtcagaaattacactcaccagtaatttattatcggtaatttctggcagttcaaatacgcgcagacggacatcccgcttgccataaatagcagcaactttggttttcatttttacctctgtaatcagtgtttatgttcggcggttaattgattaaataaagtgtcgagttttggatcgccaatatagttattaatcaatatcagtggtttatccgtcacacgtttcacgcgcccttccagactggcatgagtaacgacgatatccgcatccgcaggcacgttttctatggcgtaatgttttacttcaattgccagccccgctttttccaggcgtttacggaaggtggtcgcgcccatcgcactggagcccatccccgcatcgcaaacaaaggcgatacgcttaaccctgcttaacgagaatgcaccctcttgtttcatcgccttaaccgcattggctgactgagcaaactcatcttcgctctccgtttccaccgttttttccatcttcagtatcagcgaagtaatagcaaaggacaccagggtacctaccgtaacaccggcaattgtcgccaggaacgagcctttcggcgtcagtgccaggtaagcaaagatagaccccggacttgggccagccaccagaccaccgtccagtaagttaaacatccaggtgccagacataccgcccgcaatcatggcaataatggtcagcggcttcatcagcacatacgggaaatacagttcgtggatcccaccgaggaagtgaataatcatcgccccgggcgcagaacgtttactcatccctttaccaaacaaggtaaacgccagcagcagccccaggcccggacctgggttagaggccaccataaagaagatggatttaccgttaaccgaagcctgttgcattcccagcggataatagacgccctgatcgatcgcattattgaggaaaagcactttcgccggttcattgatgactgacaacaatggcagataacccgcatgtaccagcgcctcaatacactctttgacgaaagtattggcaattaacaccgccgggccgataacttcaaaacccagcagacaaaggagcatccccgcgatacctaatgagaagttattgataaccatctcaaaaccggcaggtatgcgtttttccagtgccttatcgacatattttatgaccaacccaccgagcggccccatgatcattgagccaaggaacatcgggatctctgcgccaacgatcacaccaatagtacctattccgcccatgaccgccccgcgtttaccgccgaccagatgaccacctgtagaaccaatcatcacgggcaataaataggtaatcatcgggccgacaattttggcgaaatgttcgttaggcagccaaccggtgggaataaataacgcagtaataaaaccccaggcaataaaagcaccaatattggggatgaccattgcagtcaaaaagcccccaaaagcctggacctttgcacgagcagacttgttttccataatattatcctgtagaggagagagtaattatccgcggctgataatgtccgctaattgtttttctgatgatgctgttaagagttgttcgagtatttcttcttcgcacagtaattcacttaacgcctgaatagcgccaatgtgcgaatcggcatcggcagcagagagtccgatgagtaatttaattggttcgtcattccccggaaaataaacaccttgttcaagtaatgtcaaagacatcccggttttaagcgccccacattccggtcgcgcatgaggcattgccacgcctggtgcgagaatataataagggccattgttaatggtggaatctttaattgcctgaatgtaattctcgctgatatagtttttatccagcaatgataccatcgagaaatcgatagcttcctgccaatcttttgctgaatgtataactgagattgatgattctggaaaataatcactaagccgcataaattatccttattttatttttagggtaccgtccggcggtaaaaataaaatactcgtgcggtttaatgaaagcaattgagcagggaaaccggtgttttgaaaacagtgaattattaatttcttatataacattgagttatagatataacaacaaatgtcaatacgcatatcgtgatgcatattacataattgatatttattgcatataaatatttgtgatctacaacacgccttatctattgcttgtccgcaaacggacatatcaaggtaataaaaaaggtcgccgaagcgacctttttacccgaaatgctaattacagcagttcttttgctttcgcaacaacgttatcaacagtgaagccgaactcttcaaacagcagctctgccggagcagattcaccgaaggtggtcataccgacgatagcaccgttcaggccaacatacttgtaccagtagtcagcaatacccgcttctacagcaacgcgtgcagtaaccgctttcggcagtacggattcacggtaagcagcatcctgcttgtcaaatgcgtcggtagacggcatggacaccacgcgcgctttcacgccttcggcagtcagtttttcgtaggcagcaacagccagttcaacttctgaaccggtagcgatgaaaatcagttccggctgaccggcgcagtctttcagcacataaccaccgcgcgcgatgtttgccagttgctcttcagttcgttcctgctgcgccaggttctgacgggagaggatcagtgcggtcgggccgtcctgacgctcaacaccgtatttccacgcgaccgcggattcaacctggtcacacggacgccatgtagacatgttcggggttacgcgcagagaagcgacctgctcaaccggctggtgagtcgggccgtcttcgcccagaccgatggagtcgtgggtgtaaaccatcacctgacgctgtttcatcagcgcagccatacgtacggcgttacgtgcgtattccacgaacatcaggaaggtggaggtgtacggcaggaagccaccgtgcagggagataccgttagcaatcgcggtcataccgaactcgcgaacaccgtagtggatgtagttacccgcagcatcttcgttgattgctttagaaccagaccacagggtcaggttagacggcgccaggtcagcagaaccgccgaggaattccggcaacagcggaccgaacgcttcgatagcattctgagacgctttacggctggcgattttcgccggattagcctgcagtttagcgatgaactctttcgctttagcgtcgaagtcagacggcatttcgcctttcatacggcgggtaaattcagcggcttcctgcggataagctttcgcgtaagcagcgaatttctcgttccatgcggattctttcgcctggcctgcttctttcgcatcccactgagcatagatttcagacgggatttcgaacggcgcatatttccagcccagttgttcgcgggtcagggcaatttcagcgtcgcccagcggcgcaccgtgggagtcgtgggtaccggctttgttcggggaaccgaaaccgatgatggttttgcacatcagcagggaaggtttgtcagtcactgcgcgcgcttcttctactgcgcgtttgatagatgccgcgtcatgaccgtcgatgtcgcgaataacgtgccagccgtaagcttcgaaacgcattgcggtgtcgtcggtgaaccagccttcaacgtgaccatcgatagaaataccgttgtcatcgtagaatgcaatcagtttacccagcttcagcgtacccgccagagagcaaacttcgtgggagatgccttccatcatgcagccgtcgcccatgaaggcgtaggtgtagtggtcgacaatgtcgtggcccggacggttaaactgcgccgccagcgttttttctgcaatcgccataccgactgcgttggcaataccctgacccagcggaccggtggtggtttccacaccagcggtgtaacccacttccgggtgacccggagttttagagtgcagctgacggaagtttttcagttcttccatcggcagatcgtaaccggtgaggtgcagcaggctgtagatcagcatggagccgtggccgttggacagcacgaagcggtcacggtcagcccaggacggattctgcgggttgtgtttcaggaaatcacgccacaggacttcggcaatgtcagccatacccataggggcacccgggtgaccggatttggctttctgtactgcgtccatgctcagcgcacgaatagcattggcaagctctttacgtgaggacattttgactccagatcggatgatgaagggcacgcccttaacgacttgacgacagcgcgttttgggctacgccggaaaatttgccaacaatttaccgcaagccgcgcgtcatgtacatggaacatccttttgccgcttcagaaatctctggatcatgctcgcatgttgcgcaatctactcgcccgtccgctgcgcttttccttatactgagactgagcgtcgattcacctgcaaacggcgcatttttagaataatcctgaccttgtgcggaagagaaaacatgaaaattcgcgccttattggtagcaatgagcgtggcaacggtactgactggttgccagaatatggactccaacggactgctctcatcaggagcggaagcttttcaggcttacagtttgagtgatgcgcaggtgaaaaccctgagcgatcaggcatgtcaggagatggacagcaaggcgacgattgcgccagccaatagcgaatacgctaaacgtctgacaactattgccaatgcgctaggcaacaatatcaacggtcagccggtaaattacaaagtgtatatggcgaaggatgtgaacgcctttgcaatggctaacggctgtatccgcgtctatagcgggctgatggatatgatgacggataacgaagtcgaagcggtgatcggtcacgaaatggggcacgtggcgttaggccatgtgaaaaaaggaatgcaggtggcacttggtacaaatgccgtgcgagtagctgcggcctctgcgggcgggattgtcggaagtttatctcaatcacaacttggtaatctgggcgagaaattagtcaattcgcaattctcccagcgccaggaagcagaagccgatgattattcttacgatcttctgcgccaacgcggcatcagcccggcaggtcttgccaccagctttgaaaaactggcaaaactggaagaaggtcgccaaagctcaatgtttgacgaccatcctgcatccgccgaacgcgcccagcatattcgcgatcgcatgagcgcggatgggattaagtaaagcctggtggtgtcgaacgtaggtcagataaggcgttcacgccgcatctgacatgaatggcacatttgttaccttgtgcgcattgccggatgcgatgctggcgcatcttatccggcctacgggtgccgaacgtaggtcggataaggcgttcacgccgcatccgacattaatggcacgttttacccgtgcgcatcgcatctggtgcttactcgccctttttcgccgcctgaatatacagcatttccagcgccagcgttgccgctgccagagcagtgatttccgactgatcgtatgccggagccacttccactacgtccatcccaacaatgttgagatctttcaggccgcgtaccagtttaatagcgcgatcggaggtcaggccgccaatcactggcgtaccggtgcctggtgcaaaagcaggatccaggcagtcgatatcaaaagtcaggtaaaccggcatatcacccacaatctgtttcacttgggcgataacgtcatccacgctgcgatcgttcacctggcaggcgtccagcacggtaaagccgttgtctttatcaaactcggtacgaataccaatctgcacggaatgattcgggtcgatcagaccttctttcggcgcggtatagaacatagtgccgtggtcaaattcacaaccgttcgcataggtatcggtgtgggcgtcaaagtgtaccagcgccattttgccgaaatgcttcgcatgagcacgcagcagcggcagcgtaacaaagtggtcaccaccgaaagagagcatacgcttaccggcagccagcagcttctcggcgtgcgcctgcagcttttcgctcatctcacgggcatcgccaaaggcatataccagatcgccgcagtccacgacgttcagacgctcacgcatgtcgaaattccacgggaagcggttgtgttcccaggccagattcgtcgaaacctgacggatcgctgccggaccgtggcgaccacccgcacgaccagaagtggccatatcgaacggcacgccagtaatcacccagtctgcatcgctgtcatacggctggaagttcatcggcaggcgtaaaaaaccaaaggcattggaaaccagtgagttatcgtattgatgacctaaggtgctcatggatggactcctattacaaagtcgatataaaaaaacccttccgcgtcgttaggcccgacgaggaagggttggatttgtcacaataaattgtggcggattatcaccgctaaattaagcggattcaagtaacacaggacttactcatcttcaagataagtataaccgtacaaacctgcctcgaactcttcaaggaactgttgttgcagttcagcatcaagatcggttttcttcacttgatcgcggaactgggttaacagcgttttcggatcgagctgtacatattgcagcatgtccgccacggtatcgccttcgtcagacagttctacttctacgctaccgtcagggaagacgaacacgtcaaccgcttcggtatcaccgaacaggttgtgcatgttgccgaggatctcctgatatgcgccgaccataaagaaaccgagcatcggcggattctctggatcgtactccggcattggcattgtcgtggcaataccgtcaccatcaatatagtggtcgatagcaccgtcagagtcacaggtaatatccagcagcacagcgcgacgttccggcacttgatccagcccttccagcggcagaaccgggaacaactggtcgatcccccatgcgtccggcatcgactggaacagcgagaagttgacgtacattttgtccgccatacgttcctgcagctcgtcgataatcggacgatgagcacggttttgcggatccagctgcttttgcacttcatggcacatgctcaaataaagctgctcagcccatgcacgttcttgcaggctaaagatgccggaagagtagccgatatgaatgtcgtgcagatccatctgactgtcgtgtaaccattcacgcagagaacggcgagttcccggttcgtgcatctcctgccaggtttcccacatgctttgcagcgcgcgcggcgcatcttctgcaggcgcggtcggcaccgtgtattcgttacgttccacgccgatgatattagacaccagcacggtgtgatgcgcagtcaccgcacgacccgattcggtgattaccgtcggatgcggcagaccgttttcttcacacgcatcgccaatcgcccagataatgttgttggcgtattcattgaggccgtagttcaccgaacagtcggactgcgaacgagtaccttcataatccacgcccagaccgccgccgacgtcgaagcactgaatattgacgcccagcttgtgcagttccacatagaaacgcgcggattcacgaacgcctgtcgcgatatcgcgaatattcgccatctgcgaaccgaggtggaagtgcagtagttgcaggctgttgagacgcccggcttcacgcagggtttcaaccagttgcagtacctgagtcgcagccaggccgaacttcgatttttccccgccggaggactgccatttacccgaaccctgcgaagccagacgtgcacgcacgcccagacgaggaacgacattcagacgttctgcttcatccagcacaatggcgatttctgacatcttctcaatgaccagatagaccttgtgccccatcttctcgccaattaatgccaggcggatatattcgcggtctttataaccgttgcagacgatgacgctacgggtcatgccagcatgtgccagtactgccatcaactcggctttggaaccggcttccagacccagcggttcgcccgaatgaatcagggactcaatcacgcggcggtgctggttaactttgatcggataaacaaggaagtaatcgccgttatagccgtaggattccctcgcacgtttgaacgcggcgttaatggaacgcaaacggtgctgcaggatctgtgggaaacagaacagtgcaggcagacgctggccctgtgcttcacgagttttcactaactgcgcgagatcgacgcgagcttccgggacgtccgggtccgggcacacgctaatgtggcccagctcgttaacgtcatagtagttattgccccaccaggcaatattgtaagtacgcagcatcttgctggcttcctgggagctcattgcaacctcctgcatggagcgtagtacaccgtgttcgcccgctgacgaaggcaaacccatagacatgtcgtcagacatagcgaacctcaaattattttattaagtgtaaaacagttaacgactatcgcagcctggaactgcgataacaacccataagcacatggattttccagcagtgaatgctgacgctccaactgcgcaaccggtttctttttcataacattattaagcacataaccgaacgtaagtgtgaaagttcggcgaaaccacgagaaaactcttgtttttacaagagcgcccttgttcagtcctcagtaactgtaaccagctcttgaatcctgagaagcgccgagatgggtataacatcggcaggtatgcaaagcagagatgcagagtgcggggaacgaatcttcaccagaacggtgagacaggttaagcagcagacaacggttcattatttcgtatcacctccacggccgcctgttaagacgaacccacaagccaaaactctgatttcaacccggctggaagtggcaacacgaaagaaacgtcgtgtgctttttatttaagccgcgcgccgcgttttataccccacaatggcagaaaattgcaaaagataaatacgcagaatgccggcattgtcaggaaaaatttccagccacgtttttaacagaatgagacacgattcaaaaaaaagtggaaatagggtgaagaattgacctaaaatagccatccagatgttaatccatccataccgattaacactcagactgccagtgtttttaacctgcagagtcgtggtaggatccgctaccacagaaaatccacacaacagtttgagctaaccaaattctctttaggtgatattaaatatggcaaaacacctttttacgtccgagtccgtctctgaagggcatcctgacaaaattgctgaccaaatttctgatgccgttttagacgcgatcctcgaacaggatccgaaagcacgcgttgcttgcgaaacctacgtaaaaaccggcatggttttagttggcggcgaaatcaccaccagcgcctgggtagacatcgaagagatcacccgtaacaccgttcgcgaaattggctatgtgcattccgacatgggctttgacgctaactcctgtgcggttctgagcgctatcggcaaacagtctcctgacatcaaccagggcgttgaccgtgccgatccgctggaacagggcgcgggtgaccagggtctgatgtttggctacgcaactaatgaaaccgacgtgctgatgccagcacctatcacctatgcacaccgtctggtacagcgtcaggctgaagtgcgtaaaaacggcactctgccgtggctgcgcccggacgcgaaaagccaggtgacttttcagtatgacgacggcaaaatcgttggtatcgatgctgtcgtgctttccactcagcactctgaagagatcgaccagaaatcgctgcaagaagcggtaatggaagagatcatcaagccaattctgcccgctgaatggctgacttctgccaccaaattcttcatcaacccgaccggtcgtttcgttatcggtggcccaatgggtgactgcggtctgactggtcgtaaaattatcgttgatacctacggcggcatggcgcgtcacggtggcggtgcattctctggtaaagatccatcaaaagtggaccgttccgcagcctacgcagcacgttatgtcgcgaaaaacatcgttgctgctggcctggccgatcgttgtgaaattcaggtttcctacgcaatcggcgtggctgaaccgacctccatcatggtagaaactttcggtactgagaaagtgccttctgaacaactgaccctgctggtacgtgagttcttcgacctgcgcccatacggtctgattcagatgctggatctgctgcacccgatctacaaagaaaccgcagcatacggtcactttggtcgtgaacatttcccgtgggaaaaaaccgacaaagcgcagctgctgcgcgatgctgccggtctgaagtaatctttcttcacctgcgttcaaaggccagcctcgcgctggcctttttcttttggataggcgttcacgccgcatccggcaaaaaaaccgcccgcacaataacatcattcttcctgatcacgtttcaccgcagattatcatcacaactgaaaccgattacaccaaccacaacagacaaagatttgtaatattttcatattattattcggttttcacagttgttacatttcttttcagtaaagtcttaattgcagataacagcgtttaatctatgatgatataactcaattattttcatgcacttaaatcataactaagataaatgttagtgtaagcgattacactgatgtgatttgcttcacatctttttacgtcgtactcacctatcttaattcacaataaaaaataaccatattggagggcatcatgcctgacgctaaaaaacaggggcggtcaaacaaggcaatgacgtttttcgtctgcttccttgccgctctggcgggattactctttggcctggatatcggtgtaattgctggcgcactgccgtttattgcagatgaattccagattacttcgcacacgcaagaatgggtcgtaagctccatgatgttcggtgcggcagtcggtgcggtgggcagcggctggctctcctttaaactcgggcgcaaaaagagcctgatgatcggcgcaattttgtttgttgccggttcgctgttctctgcggctgcgccaaacgttgaagtactgattctttcccgcgttctactggggctggcggtgggtgtggcctcttataccgcaccgctgtacctctctgaaattgcgccggaaaaaattcgtggcagtatgatctcgatgtatcagttgatgatcactatcgggatcctcggtgcttatctttctgataccgccttcagctacaccggtgcatggcgctggatgctgggtgtgattatcatcccggcaattttgctgctgattggtgtcttcttcctgccagacagcccacgttggtttgccgccaaacgccgttttgttgatgccgaacgcgtgctgctacgcctgcgtgacaccagcgcggaagcgaaacgcgaactggatgaaatccgtgaaagtttgcaggttaaacagagtggctgggcgctgtttaaagagaacagcaacttccgccgcgcggtgttccttggcgtactgttgcaggtaatgcagcaattcaccgggatgaacgtcatcatgtattacgcgccgaaaatcttcgaactggcgggttataccaacactaccgagcaaatgtgggggaccgtgattgtcggcctgaccaacgtacttgccacctttatcgcaatcggccttgttgaccgctggggacgtaaaccaacgctaacgctgggcttcctggtgatggctgctggcatgggcgtactcggtacaatgatgcatatcggtattcactctccgtcggcgcagtatttcgccatcgccatgctgctgatgtttattgtcggttttgccatgagtgccggtccgctgatttgggtactgtgctccgaaattcagccgctgaaaggccgcgattttggcatcacctgctccactgccaccaactggattgccaacatgatcgttggcgcaacgttcctgaccatgctcaacacgctgggtaacgccaacaccttctgggtgtatgcggctctgaacgtactgtttatcctgctgacattgtggctggtaccggaaaccaaacacgtttcgctggaacatattgaacgtaatctgatgaaaggtcgtaaactgcgcgaaataggcgctcacgattaatctccccaagcttcctcccatcgcggaggaagccacctcttgcagtcatcttttcttcgctctatcctctgccgctatgaaaacatcccgtctccctatcgccatccaacaggccgttatgcgtcgcctgcgggaaaaactcgcccaggccaacctgaagctagggcgtaactacccggagccaaaactctcttacacccagcgcggaacctccgccggaacggcctggctggaaagctatgaaattcgcctcaatcccgttttgctgttggaaaacagtgaagcttttattgaagaagtggtaccgcacgaactggcacatttgctggtatggaaacatttcggccgcgtagcgccacatggcaaagagtggaagtggatgatggaaaacgtgctgggtgttcccgcccgtcgtacgcatcagttcgaactgcaatccgtgcgtcgcaacaccttcccctaccgctgcaagtgccaggagcatcagcttaccgtacgccgccataatcgcgtagttcgtggcgaggccgtctatcgctgtgttcactgcggtgaacagctggttgcgaaataaccatctgaactatcaggaactttcctgatctggctgattgcataccaaaacagctttcgctacgttgctggctcgttttaacacggagtaagtgatgtaccgttatttgtctattgctgcggtggtactgagcgcagcattttccggcccggcgttggccgaaggtatcaatagtttttctcaggcgaaagccgcggcggtaaaagtccacgctgacgcgcccggtacgttttattgcggatgtaaaattaactggcagggcaaaaaaggcgttgttgatctgcaatcgtgcggctatcaggtgcgcaaaaatgaaaaccgcgccagccgcgtagagtgggaacatgtcgttcccgcctggcagttcggtcaccagcgccagtgctggcaggacggtggacgtaaaaactgcgctaaagatccggtctatcgcaagatggaaagcgatatgcataacctgcagccgtcagtcggtgaggtgaatggcgatcgcggcaactttatgtacagccagtggaatggcggtgaaggccagtacggtcaatgcgccatgaaggtcgatttcaaagaaaaagctgccgaaccaccagcgcgtgcacgcggtgccattgcgcgcacctacttctatatgcgcgaccaatacaacctgacactctctcgccagcaaacgcagctgttcaacgcatggaacaagatgtatccggttaccgactgggagtgcgagcgcgatgaacgcatcgcgaaggtgctgggcaatcataacccgtatgtgcaacgcgcttgccaggcgcgaaagagctaacctacactagcgggattctttttgttaacccctaccccacgcgtacaaccgcgtggggagacgacgcggatttttaactatgcgtatcccccgcatttatcatcctgaaccactgaccagccattctcacatcgcgctttgcgaagatgccgccaaccatatcgggcgcgtactgcgcatggggccggggcaggcgttgcaattgtttgacggtagcaaccaggtctttgacgccgaaattaccagcgccagcaaaaaaagcgtggaagtgaaggtgctggaaggccagatcgacgatcgcgaatctccgctgcatattcacctcggtcaggtgatgtcgcgtggtgaaaaaatggaatttactatccagaaatcgatcgaactcggtgtaagcctcattacgccacttttttctgagcgctgcggcgttaaactggatagtgaacgtctgaacaagaagcttcagcagtggcagaagattgcaattgctgcctgtgagcagtgtggtcgtaaccgggtgccggaaatccgtccagcgatggatctggaagcctggtgtgcagagcaggatgaaggactgaaactgaatcttcacccgcgcgccagtaacagcatcaatacgttgccgttaccggttgaacgcgtccgcctgctgattggcccggaaggcggtttatcggcagatgaaattgccatgactgcccgctatcaatttactgatatcctgttgggacctcgcgttttgcgtacagagacaactgcgctcaccgccattaccgcgctacaagtacgatttggcgatttgggctaacggagaagaataatgatcaagctcggcatcgtgatggaccccatcgcaaacatcaacatcaagaaagattccagttttgctatgttgctggaagcacagcgtcgtggttacgaacttcactatatggagatgggcgatctgtatctgatcaatggtgaagcccgcgcccatacccgcacgctgaacgtgaagcagaactacgaagagtggttttcgttcgtcggtgaacaggatctgccgctggccgatctcgatgtgatcctgatgcgtaaagacccgccgtttgataccgagtttatctacgcgacctatattctggaacgtgccgaagagaaagggacgctgatcgttaacaagccgcagagcctgcgcgactgtaacgagaaactgtttaccgcctggttctctgacttaacgccagaaacgctggttacgcgcaataaagcgcagctaaaagcgttctgggagaaacacagcgacatcattcttaagccgctggacggtatgggcggcgcgtcgattttccgcgtgaaagaaggcgatccaaacctcggcgtgattgccgaaaccctgactgagcatggcactcgctactgcatggcgcaaaattacctgccagccattaaagatggcgacaaacgcgtgctggtggtggatggcgagccggtaccgtactgcctggcgcgtattccgcaggggggcgaaacccgtggcaatctggctgccggtggtcgcggtgaacctcgtccgctgacggaaagtgactggaaaatcgcccgtcagatcgggccgacgctgaaagaaaaagggctgatttttgttggtctggatatcatcggcgaccgtctgactgaaattaacgtcaccagcccaacctgtattcgtgagattgaagcagagtttccggtgtcgatcaccggaatgttaatggatgccatcgaagcacgtttacagcagcagtaacccaccttagcgagaaggatctcgttgagactctgagtgacagcgcccttctttccacgcatactgggcgctgttgcttttttgaaccaggaaacagaacctctgacaatgaatttacagcatcactttcttattgccatgcctgctctccaggatccgattttccgtcgttccgtggtctacatttgcgaacataataccaatggtgcaatggggatcatcgtcaacaagccgctggaaaatctcaaaattgaagggattctggaaaagctgaagatcacgccggagccgcgtgatgaatcaatccgtctggataaaccggttatgctcggcggtccgctggctgaagatcgcgggtttattttgcatactccgccctccaattttgcttccagcattcgcatttcagacaacacggtaatgaccacttcccgcgatgtgctggaaacgctcggcaccgataaacaaccgtccgacgtattggtggctctgggttatgcctcctgggagaaaggtcaactggaacaagaaattctcgataacgcgtggctaacggccccggcagatctgaatattctgttcaaaacgccgattgccgaccgctggcgcgaggcggcaaaactgattggtgtggatattctcaccatgcctggtgtggcaggacacgcctgatgagtggaaccttactcgccttcgacttcggcaccaaaagcattggcgtagcggtcggccaacgcattacctgcaccgctcgccctttgcctgcaattaaagcacaggacggtacgccggactggaacattatcgagcgtttactgaaagagtggcagccggacgaaatcatcgtcggtttgccgctgaatatggacggcaccgagcaaccattgactgccagagcgcgtaaatttgccaaccgtattcatggccgtttcggtgttgaagtaaagctccatgacgagcgtcttagcactgtggaagcccgttccggtctgtttgaacagggcggctatcgggcgctcaacaaaggcaaagttgactctgcctctgcggttattattctcgaaagctatttcgagcagggatattaaggcgatttaaacgcctggcggagtgtaaataatatcatcgcgtcttattgccggatgcggcgtgaacaccttatccagcacacatctggcagcggctataggtctgataagacgcgttagcgtcgcatcagacatttattgcctttgtaggcccgataagcttgcgcatcgggcatggcaacgtcacaaacgcccttcccccacccggtgctgataactctgctgaaacgttatcatccccacctgctgcccggtttgaataacatgcggtaactggtgggttttcccttcgcgaatcaaattccccaccgcgggtgtgttaatcagcaattcaaatagcgccacgcgtccttcctgtttatccacttccagcttttgtgacagcactgcccgtaaactacctgccagttgattacgcacggggtctttttcctgcgccggaaatgaatccaccagtcgctcaactgcctgcgcggcaccacgcgtatgtaatgttgccagcaccaaatgcccggtttctgccgccgtcagtgccagacggattgtctcgctgtcacgcagctctccgagcaaaatcacatcaggatcttcccgcaatgcggcccgcaatcccgatgcgaacgtcatacagtgcaaaccaatttcccgctgctggatcaaacatcgctggctggcatagagatattcaacaggatcttccagcgtcagaatatgcgcatcggcatgttgattgagatagccaaccatcgccgccagcgtggtagatttgccactccccgtcgcccccgtcaccagaatcaggccattctcgctcttgagtaattccggcaataccgttggtgcgccaagctgttcgagctgcgggcagtgcgaaggtaacagccgtaacgccagcgaaatgccatgccgttgcgcgaatgcgctgccacgcaatcgctggttttccgccagcgacacggcaaaatccagctgaccattctccagcaatattgcccgctgatcgtcatccagccactcccgcagtagctcttcgacgtccggcgtatcaaacggcgcagcttccattctgccgcgaatgcgccatcgtgcgggccaggcgctgcacaggtgtagatccgagacgttatgctttacactaagggccacaatttcttccatattcatactaagatcctcggaaaatgaacgatattgcgcataacctggcacaggtccgggacaaaatctcagcggctgcaacgcgttgcggccgttctccagaagaaattacgctgcttgcagtcagtaaaacaaaacctgcgagcgccatcgcagaagccattgatgccgggcagcgtcaatttggtgaaaactacgttcaggaaggggtagataaaattcgccactttcaggaactgggcgtaacaggattagaatggcattttattggcccgttgcagtctaataaaagccgcctggtggcagagcatttcgactggtgtcataccatcgaccgtttgcgcatcgctacccgtctcaacgaccagcgcccggcagaacttccccctcttaacgttctgattcaaattaacattagtgatgaaaacagtaagtccgggattcaactggctgaactggacgagctggcagctgcggtcgctgaactaccgcgtttacgtctgcgcgggttgatggcaatccctgcgcctgagtcagaatatgtaaggcagtttgaagttgcacgccaaatggctgtagcatttgccggactgaaaacgcgctacccgcatatcgacacgctctctctgggaatgtcggacgatatggaagccgccattgcggcaggtagcacgatggttcgtatcggcactgcaatttttggtgcgcgtgattactctaaaaaataaggaattaaaggaacgccatgaatacgttgactttcctgctttcaacggtcattgagctgtataccatggtgctgttattacgcatctggatgcagtgggctcattgtgatttttacaaccccttctcacagtttgtagtgaaggtaacgcagccaattatcgggccactgcgccgcgttattccggcaatggggccaattgacagcgcctcgctgctggttgcctatattctcagttttatcaaagccatcgtgctgtttaaagtggtgaccttcctgccaatcatctggattgccggtttactgattctgctgaaaaccatcggcctgctgattttctgggtcctgctggtgatggcgattatgagctgggtaagccaggggcgtagcccgattgaatacgtgctgattcagctggccgatccgctgctgcgcccgattcgccgcctgctaccggcaatgggtgggattgatttctcgccgatgatcctcgttctgctgctgtatgtcatcaatatgggtgtcgcagaagtattacaggcaaccggaaatatgctgctgccagggctgtggatggcgttatgaatgccgtaacagttaatgatgacggtctggttttacggctctatattcagccgaaagccagccgtgattctattgtcggtttacatggcgacgaagttaaagtcgccattaccgcgccgccggttgacggccaggccaacagtcatctggtgaagtttctcggtaagcaattccgggttgccaaaagccaggtggtgattgaaaaaggcgaacttggccgccacaaacaaattaaaatcattaatccgcaacaaatcccgccagaaatcgcggcgttaattaattaggtatcctatgcaaaaagttgtcctcgcaaccggcaatgtcggtaaagtgcgtgagctggcgtcgctgcttagcgacttcggtcttgatatcgtggcccaaacagacctcggcgttgattccgctgaagaaaccggcctgacctttatcgaaaacgcgattctgaaagcgcgccatgcggcaaaagtgaccgctttaccggcaattgccgacgactctggtctggcggtagatgtgcttggcggcgcgccgggcatttactccgcgcgttattccggtgaagacgcgaccgatcaaaagaatctgcaaaaactgctggaaacaatgaaagacgtaccggacgaccaacgtcaggcgcgtttccactgcgtgctggtatatctgcgtcacgcggaagatcccactccgctggtatgccacggtagctggccgggcgtgattactcgtgaaccagcgggcactggtggctttggttatgatccaatcttcttcgtaccttccgaagggaaaaccgccgccgaactgacccgcgaagaaaagagcgccatttcccaccgtggtcaggcgttgaaactgctgctggacgctttacgtaatggttaaattacctccgctgagtctctacattcacatcccgtggtgcgtgcagaaatgcccgtactgcgatttcaactctcacgcgttgaaaggagaagtgccgcacgacgattatgttcagcatctgcttaacgatctggacaacgatgtggcttacgctcagggccgtgaagtaaagacaatctttattggcggtggtacgccgagcctgctttccggcccggcgatgcaaacgctgctggacggcgtgcgtgcgcgtttgccgctggcagcggatgcagaaattactatggaagcgaaccctggcacggtagaagccgatcgctttgtcgattatcagcgtgctggtgtgaaccgcatctctattggtgtgcagagttttagcgaagaaaagctgaaacgacttgggcgtattcatggcccgcaagaagcgaaacgcgcggcgaagctggcgagcggtttagggttacgtagctttaaccttgatttgatgcatgggctgccggatcaatcactggaagaggcgcttggcgatctacgccaggccattgaactgaatccgccgcatctttcctggtatcaactgaccatcgaacccaatacgctgtttggttcgcgaccaccggtgctgccggacgatgacgcgttgtgggatatattcgaacaggggcatcagttattaaccgcagcgggttatcagcaatatgaaacttccgcttacgccaaacccggttatcagtgccagcacaatctcaactactggcgctttggtgactacatcggtattggctgcggcgcacacggcaaagtgaccttcccggatgggcgcattctgcgtaccaccaaaacgcgtcatccgcgtggttttatgcaaggaaggtatctggaaagccagcgtgatgtcgaagccacagataagccgtttgagttctttatgaatcgcttccgtctgctggaggccgcgccgcgcgtggagtttattgcgtataccgggctttgcgaagatgtgattcgcccacagttagacgaggcgattgcccagggttatctcaccgaatgtgcggattactggcagataacggaacatgggaagctgtttttaaattcgctgctggagctttttctggctgagtaaacttgtattgccggatgcggcgtgaacgccttatccagccgacatgtggcagcggttgtaggtctgataagacgcgcaagcgtcgcatcagacgttgattgccggatgcggggtcaacgccgcatcctgctacaaatcgtgcactatatcaaacttacttaatcaccccattgcgccgcagttgttcggtatcttttttccagcgttcattagcttggttgatatcgtcaattttcatcaaaatcgcgacttttttactgtttatttctgaaactttcatcgttaacggatattgccctttttcgagcgttacccagtcatcctgcaatttacggctaagtttttgtgattgcagaaaagtctgtcgccgttgttcgttgatatcgaaatctcgtttctgctgaatcggcacttcataacactcttcactctgtttatgacatgccgcaatcgccggttgataaacctctttgtcatatttaaccgcgaacgcctcgctatcgttctgtttattaaactcatcacgctgttggtgaatttttttaaaggcgtcttcgcgggtcatttgcttaccgtttgcatcttttccccaatatgcatccgctgctttctgcgccgccaccatttgcttatcaagcgctttcacttccttttccagcgcaggaatcgagttcttctgggtattcaacgcagattcaagctgactaaagcgataattgaaatcttcgctattcacgatcagatatttattattcgttttgatatcgtcgaccacccgcccacgatcgctggctgccgcctgaaaagagtaaaagttcaccgaccagccagacgcgggcgttcctttactggttaacatcgccgagaattttaccggtttatctttcgtccaggtctgttcgagcagttcgtaatctgccaactgaccgacccaggtatagagatcgtcactggaagagacatcgccttccgctgaccaggtggcctgattacccttagcatcaagattttttaaggtgatagcatcaagcttgagaatgccgtgatactgctttttgaattgatcttttaagatattttcagttggcggttcgccatctgcccaggcattaccagtcatcaacataagcagtgccgtgccaacaatccattgctttttcacccgaaaaacctcacgcggaataatttattccggtgattatcattagggtaattaaaattggcaatggacgtgagtctgaagtgaaaaagccccggcacgataccggggcgaggcgattagtactgattgaagatctgctggatctgctgcggatctttggtttgcgtcagagccagttgcagcagaacgcgcgctttttgcgggttcagcgtgccagaggcgacgaagccgtatttcgcatcatccacttcggcatcctgagtggtagcgcccgtcggtacgcgggaagaacgcacgactgcagtaccggttttcgcggcggtcgccagcgtgtcgaacacagatttatacaggttgccgttacccacaccagcgctaacgatgccatcatagcccgcatctaccagtgctttagccggaagatcggatgcgttagcgtagttataaacaatgccgactttcggcagttcattcagcttagagacatcgaatggcgtgtcgctggtatgcttacgtgccggggtacgctggtagtcaatcttaccgttgtgaatgtaacccagaggaccgtagttaacagacttgaaggtcgctacgtcggtggtgttggttttggtgacgtcacggccatcaagcacggtgtcattcatcactaccagcacgccacggttggcggaggctttatcagctgcggtcactaccgcgttatacaggttgaatggaccgtctgcgctcatagacgtggacggacgcattgcgccgaccatcaccaccggtttgtcgcatttcaccgtcaggtcgaggaagtaagcagtttcttccatcgtgtcggtaccgtgggtaatgacgaagccgtcggtcttatcgcagtcggtgttaatttttttcgccagtgtcagccagacattatcgttcatgtcctgggagccgatattcactacctgctcgcctttaacgttcgcaatgtcttttagttgcggcaccgcattaaccagattttctacgccaactttacccgctgtgtagttagatttggttgcggagtcaccaccaccggcaatggtcccgccggttgctaaaatggtgatattgggtaatgccaatgctgcaccactaaaacccataaccagtgcggcaagtgccgtctttttgaaaaactccatttcattcctccagttacgtgaacgctacgcattatcccttagctctgtatgggaaatttgacgttaaacaatttacaacgtgaatatattttggagatctacaaagttagaggcaggtaacaaaacgaagaattaaacggcataaaaaagtattatgccgtcttaaaatagaggattattttaaattcccgaccagggctttgcggctatcttccagagtcacaacgcggctacaaacatctttgccaaactgctggaaatctttttcctgctttttccactcggtttggattgaggattgcagcccccccaggcttcccagcacattctgtaatgggttaccgccgcttttcagcaccgctttcgcgcccatttcattaatgctgtcctgtaaaattccacccattgcctgattcactaattgctggccttcggcgcgaacctgatcaatggctttatagtgaaacgtcaggccatcgctgcgcgtttcaataatgcggttcatctgctctttcagctgcgcatcaagtttggtcagacggctgcgcattttgctgctttcgcccatctcctgaacgataattttatccagagcaatacgggctttctcgacgcggcttttcgcgccttcatcaatccacggcagcgtgctgcgtagttcagcctgataatccttcgcctgctcgcgctgggcggcattcagggaatattgcttaccgttatacatcacgttgccgtctggcgtgatcaccagattgccgttttcgcccttcacctgcacggtttgcgggctgacaatcacatcgtcacgcggcgtgacgctgcactggtagtcggcgtgagcggtcattgccgtcactgaaagtgctgccgccagcagcattttgcgcatcatagtcttccctcaagaaaaaatcaggccagcatttgctggccccagattgataacaaagtacgcgttttccatgccggatgcggcgtaaacaccttatcccgcctactcgatcgtgcatctttccaggcctgataagcgtagcgcatcaggcagttttgcatttgtcatcgcccgtatgctttcttagtcccaccaaacgtcgaaaagttcgctggtgcgtacctcatccagtttgcgctcttccagccacttacgcacaatcgcctgatgttcttcggtgcatttgccgatttcctgcatgcagatcagaccttcccaggccagataaccgctgccgtcaaaggccagtttgttcggttcgataacctcgttaataaaatcatcaacggttttatcaatctgttcttccgatgtaccttccgggaatcgccatgccaccgaaaatcctaattcctggaattcgtcgatgtgcatttttttacgcagacgacggctacggttctttgccattatttcaccctctcgaacattaagtcccatactccgtgaccaagacgatgaccacgttgttcaaatttcgtcaccggacgtgatgccggacgcggtacgtaatcattgctctctgacaggtttttataaccgtcaatagaagacatcacttcaagcatatgttccgcataaggttcccagtcggtcgccatatggaatacgccccccagctgcagtttgctttttaccagttcggcaaacggcacctgaacgatacggcgtttattatggcgcgctttgtgccacgggtcagggaaaaagagctgcaccatgcgcaatgaattgtcaggaatcattttatgcagcacttcaaccgcatcgtgacacatcacgcgcaggttgcttaaaccttcttcatgcgcagaagccaggcacgcaccaacgcccggtgaatgcacttcaatgccgaggaagtcctgctcagggcgatctttagccattgccaccagcgacgcccccatgccaaaaccaatctcaagcgtcaccggcgcttcacggccaaaaagcgcggggaaatccagcatatcttcgctgaactcaacgcccatcaccggccagtagttttccagcgcatgttcctggcctttggtcagtcgcccctggcggcgcacaaaactacggatacggcgcagtgggcggccgttttcatcaaattccggtgaaatgacgtcgtttttcataaaggtttagtcgcttgtgaaagtgttctgaaaacgggcattatccaaagttagttgccggatgcaagcatgataaggccgtggctgcggaaagttccggtttacaccctgccgtcgctgtgctgcaatcttgcccccaacaacagtgaattcggtgaccatgcaagcgtcgcaattttcagcccaggttctggactggtacgataaatacgggcgaaaaactctgccctggcaaattgacaagacgccctacaaagtatggctctcagaagtgatgttgcaacaaactcaggttgcgaccgttatcccctattttgaacgctttatggcgcgcttcccgacggtgaccgatctcgccaatgcgccgctcgacgaagttctccacttgtggaccgggcttggctattacgcccgcgcgcgcaatctgcataaagcggcacaacaagtggcgaccttacacggcggtaaattcccggaaacctttgaggaagttgcagcactgccgggcgtcgggcgttccaccgcaggcgcgattctctcgctttctctgggtaagcactttccgattctcgacggtaacgtcaaacgcgtgctggcgcgctgctatgctgtaagcggctggcctgggaaaaaagaggtcgagaataaattatggagtttgagcgagcaggtgacgcccgcggttggcgtggaacggtttaatcaggcgatgatggatttgggtgcgatgatttgtacgcgctcgaaaccgaaatgttcgctctgtccgctacaaaacggatgtattgccgccgccaacaatagctgggcgctttatccgggcaaaaaaccgaaacagacgctgccggagcgcaccggctactttttgctattacagcacgaagatgaagtattgctggcgcagcgtccgccgagcggattgtggggcggtttatactgtttcccgcagtttgccgacgaagaaagtttgcggcagtggctggcgcaacggcagattgctgccgataacctgacgcaactgaccgcgtttcggcataccttcagccatttccacttagatattgtgcctatgtggcttcccgtgtcgtcattcaccggctgcatggatgaaggcaatgcgctctggtataacttagcgcaaccgccgtcagttggcctggcggctcccgtggagcgtttgttacagcagttacgcactggcgcgccggtttagcgcgtgagtcgataaagaggatgatttatgagcagaacgattttttgtactttcctgcaacgtgaagcagaaggtcaggattttcagctgtaccccggcgagctgggaaaacgcatctataacgagatctccaaagaagcctgggcgcagtggcagcacaagcaaaccatgctgattaatgaaaagaaactcaacatgatgaatgccgagcaccgcaagctgcttgagcaggagatggtcaacttcctgttcgagggtaaagaggtgcatatcgagggctatacgccggaagataaaaaataaaaacagtgccggagcacgcctccggcaacttgcataaaaacaaacacaacacgcacccggaatgatgaaaaaatatctcgcgctggctttgattgcgccgttgctcatctcctgttcgacgaccaaaaaaggcgatacctataacgaagcctgggtcaaagataccaacggttttgatattctgatggggcaatttgcccacaatattgagaacatctggggcttcaaagaggtggtgatcgctggtcctaaggactacgtgaaatacaccgatcaatatcagacccgcagccacatcaacttcgatgacggtacgattactatcgaaaccatcgccgggacagaacctgccgcgcatttgcgccgggcaattatcaaaacgttattgatgggtgacgatccgagttcggtcgatctctattccgacgttgatgatattacgatttcgaaagaacctttcctttacggtcaggtggtggacaacaccgggcagccgattcgctgggaaggtcgcgcaagcaacttcgcggattatctgctgaaaaaccgtctgaagagccgcagcaacgggctgcgtatcatctacagcgtcaccattaacatggtgccgaaccaccttgataaacgtgcgcacaaatatctcggcatggtccgccaggcgtcacggaaatatggcgttgatgagtcgctgattctggcaattatgcagaccgaatcttcctttaacccgtatgcggtcagccgttccgatgcgctgggattaatgcaggtggtacaacatactgccgggaaagatgtgttccgctcgcaggggaaatccggcacgccgagccgcagtttcttgtttgatcctgccagcaatattgataccggcaccgcgtatctggcgatgctgaacaatgtttatctcggcggaattgataacccaacatcgcggcgttatgccgtcatcaccgcctataacggcggcgcaggcagcgtgctgcgagtcttttcgaatgataagattcaggctgccaatattattaacaccatgacgccgggcgatgtttatcagacgctgacgacccgccatccctctgcggaatctcgccgttatctttataaagtgaataccgcgcaaaaatcctaccgccgccgataattccattaaccgcccctgacgatgctcaggggcaaaaatgttatccacatcacaatttcgttttgcaaattgggaatgtttgcaattatttgccacaggtaacaaaaaaccagtccgcgaagttgatagaatcccatcatctcgcacggtcaaatgtgctttttcaaacactcatccgcatcacgatgtgaggaaattaacatgaatcttaagctgcagctgaaaatcctctcttttctgcagttctgtctgtggggaagttggctgacgaccctcggctcctatatgtttgttaccctgaagtttgacggtgcttctattggcgcagtttatagctcactgggtatcgcagcggtctttatgcctgcgctgctggggattgtggccgacaaatggttaagtgcgaaatgggtatatgccatttgccacaccattggcgctatcacgctgttcatggcggcacaggtcacgacaccggaagcgatgttccttgtgatattgattaactcgtttgcttatatgccaacgcttgggttaatcaacaccatctcttactatcgcctgcaaaatgccgggatggatatcgttactgacttcccgccaatccgtatctggggcaccatcggctttatcatggcaatgtgggtggtgagcctgtctggcttcgaattaagccacatgcagctgtatattggcgcagcactttccgccattctggttctgtttaccctgactctgccgcatattccggttgctaaacagcaagcgaatcagagctggacaaccctgctgggcctcgatgcattcgcgctgtttaaaaacaagcgtatggcaatcttctttatcttctcaatgctgctgggcgcggaactgcagattaccaacatgttcggtaataccttcctgcacagcttcgacaaagatccgatgtttgccagcagctttattgtgcagcatgcgtcaatcatcatgtcgatttcgcagatctctgaaaccctgttcattctgaccatcccgttcttcttaagccgctacggtattaagaacgtaatgatgatcagtattgtggcgtggatcctgcgttttgcgctgtttgcttacggcgacccgactccgttcggtactgtactgctggtactgtcgatgatcgtttacggttgcgcattcgacttcttcaacatctctggttcggtgtttgtcgaaaaagaagttagcccggcaattcgcgccagtgcacaagggatgttcctgatgatgactaacggcttcggctgtatcctcggcggcatcgtgagcggtaaagttgttgagatgtacacccaaaacggcattaccgactggcagaccgtatggttgattttcgctggttactccgtggttctggccttcgcgttcatggcgatgttcaaatataaacacgttcgtgtcccgacaggcacacagacggttagccactaattacgcaaagaaaaacgggtcgccagaaggtgacccgttttttttattcttacttcaacacataaccgtacaaccgtttcacgccatccgcatcggtttcgctataaacaccttgcagctccggcgaaaatcccggcaacaaattcaccccttcttccagtgcaaggaaataacgttgaaccgccccaccccagacttccccgggtaccacgcaaagcacgccaggtggataaggcaacgccccttctgccgcaattcgcccttcggcatcacgaatccgcaccaactccacgtcaccgcgaatataagcgctatgcgcatcctgggggttcatcaccactgacgggaaactctgctggcggaacatcgctttttgtaggtctttgacgtcgaaactgacatacagatcgtgcatctcctgacacaactggcgcagggtgtagtcgcgatagcgcaccggatacttgttataaacgctcggcaacacctcaaccagcggcgagtcatcctcaatatgctgttcaaattgcgccagcatcgccaccagttgtgccagcttctcgtggctttccgccggagttaataaaaacagaatggagttgagatcgcacttctccggcacaatgccgttctcacgcagatagtgcgccagaatcgtcgccggaacgccaaagtcgctatattcgccggtttcggcatcgatacctggtgtagtgagtaacagcttgcacggatcaacaaaatactgatccgcggcatatccttcaaagccgtgccacttcgcccccggctcaaaactgaaaaaacggcggtcgctggctaacactgatgtcggataatcctgccacaatttgccatcaacaacgggcgggataaacgggcggaacagcttacagcgcgcaagaatagccttgcgcgcttcaatccctatctcaacacactcagcccacagccgacgcccactctccccttcatgaattttggcgttaacatccagtgcagcaaacagcggatagaaagggctggtagaagcatggagcataaaggcgttattcaaccgcttatgcgggcaaaaacgcgcctgtccgcggatatggttatcttttttatggatctgcgacgtctgtgagaatcccgcctgctgtttgtgcaccgactgagtcacaaagatccccggatcgttttcgttaagttctaacagcagcggcgagctatccgccatcatcgggataaattgttcataaccgacccacgcggaatcaaacagaatgtaatcacacagatgcccaacggtatcgatcacctgacgggcgttatagacagtgccgtcataggttcccagctgaataatcgccaggcgatacgggcgcggcaggtcggctttttctggcgcaacgtcgcgaatttgctggcgcagatactcttcattaaaacagtgcgcatcaataccgccaatgaaaccaaacgggttgcgtgaagcttccagatagaccggcgtcgcccccgcctgaatcagcgcgccgtgatgattcgacttatggttgttacggtcgaagagcaccagatcgccacgcgttaacagcgcattcgtcaccactttattcgctgccgatgtgccgttcagcacaaaataggttttatcggcatgaaagactttggctgcgaatttctgcgcatctttcgccgatccttcatgaataagcagatcgcccaattttacgtcagcgttacacatatcggcgcgaaagacgttctcaccaaagaaatcgtaaaaatggcgtccggcaggatgctttttaaaaaacgcaccatgttgatgtccagggcaagcaaaggtgctgttgcccatctcaacgtactgcgtcagcgtgtcataaaacggtggcagcaaattctcttcatactgacaggctgcggattccagctccagccactgctgctcgttgccgttgattaccgccgtaacgcccgcaggtaattcaacagcatgttcggaatacaaaaacaccggtagatgaaaaccggtgcgcttaagcaacgcaagaatgccactgcgactatccgcagcggtaatgacgactgccgcgacgtccgtaaaatcagtatctcccaacgccaccacgcgacgatgagaagaaagtcgggataccagttcactactggcggcaatattcattgatttcataagcgcaaacccgtttcggggaagtaagaataccggacaaggtggaaaaccctgccccatgagatatgggtcaaactggtcaccagctccgaccgccagacatcagtaaaagcagaaacgctctgattttactgttgtcctgcagtgagcgtgcgttaacttcaccgcatgagcagtaacatagaaagggaaacgtttcgcgcgaaacggcgataagcgagagaatgtaaggagatggcgtgcatcgggcaaactccgtacagagaggagaaaattcgcgcaatcatggcacctttcgctaaagcgtgcaagccaggactttgcgaacaaacaagccatcgacggcaccaaacggtcataataagaaaatcaaacaatacagctaacaggaactcttgtggtcatcggcccttttatcaacgctagtgcagtcttactgggtggcgttctcggcgcactgctcagccaacgcttaccggaacgtatccgcgtctccatgacatcaatttttggtctggcatcgctggggattggtattttactggtggtgaaatgtgccaaccttccagcgatggttttagctacgctacttggcgctctaattggcgaaatttgtttgctggagaaaggtgtcaatacagcagtcgccaaagcacaaaatctgtttcgtcactcacgtaagaagccagcgcatgaatcttttattcagaattatgtcgcgattattgtcctgttttgcgccagcggcaccgggatcttcggggcgatgaacgaagggatgaccggcgatccgagtattttaatcgccaagtcatttcttgatttctttacggcgatgatcttcgcctgctcgctgggtattgcggtatcggtgattagtatcccattactgatcatccagttaacgctggcgtgggctgccgcgctgattttaccgctgaccacaccgtcgatgatggcagacttcagcgccgtaggcggtttattgctgctggcaaccggattacgcatctgtggcattaaaatgttcccggtggtcaacatgcttccagcactccttctggcaatgccgctttccgccgcctggaccgcctggtttgcctgacaatgcgtgcaatatcggcaaagtgatgatagattgtgcagtctgcagtaaattgaagaaatttgattgacgagacgaggcgaatcaggtttaatgcgccccgttgcccggatagctcagtcggtagagcaggggattgaaaatccccgtgtccttggttcgattccgagtccgggcaccaaattcatatcaacggacctccacggaggtccgtttttcgtttcagaacgccacaatttaagcgttctgcctccaaatcaattctaccgaactcaaccagattccccccacatcaaccccattgtgtgggtataattgcgggtataccccagttcgacagaatttataccctctttaacgcattcagaaggctgaactatggcactgactgacgcaaaaatccgggctgcaaagcccactgacaaggcttataaactcactgacggggccggcatgttcctgctggttcatcctaatggttcccgttactggcgtctccgttatcgtattctgggtaaggagaaaaccctggcacttggtgtgtatccggaagtttctctctccgaagctcgtacaaaacgggatgaggcccgaaaactgatttcggagggggttgacccttgcgaacagaaaagagctaaaaaagtagtccctgatttacaactctcttttgaacatattgcacgacgctggcatgccagtaataaacaatgggcacaatcacacagcgataaagtactcaaaagtctcgagacacacgttttcccctttatcggcaaccgggatatcacaacactcagtaccccggacctgcttatccctgttcgtgctgcagaagctaaacaaatttatgaaatcgccagtcgtctgcagcaaagaatatctgctgtaatgcgttatgccgtacagtctggcatcatcagatataacccggctctggatatggctggtgcattgaccacggtaaaacgccagcatcgccccgctcttgatctttctcgcctgcctgaacttttgtcgcgtattggcagttacaaggggcaacctgtcacccagcttgccgttatgctgaatttactggtttttattcgttccagtgaactcagatacgcccgctggtctgaaattgatattgacaatgccatgtggactattccagccgaacgcgaacctctgccaggcgtaaaattctcacaccggggctccaagatgcgaacaccacatcttgtgccactcagcaaacaggctgtagccatactgacggaacttcagacatgggcaggtgaaaatggtctgatatttacgggtgcacatgacccgcgtaaaccaatcagtgaaaatactgtaaataaagccctgagggtgatggggtatgacacaacccgggaagtctgtggccatggattccgggcgatggcgtgcagtgcattgattgaatcaggtttgtggtcccgcgatgctgtggaacgtcagatgagccatcaggagcgtaatggtgtacgtgctgcgtatatccataaagcagaacatctggaagaacgtcgactgatgctacagtggtgggcagattttctggatgcgaacagagaacaatgtatcagcccgtttgaatatgcaaagattaacaatccattaaaatagtaatcatcccgggctgccagcccgggaattattttatgaatatttttctttgtgagtaaccggaaaaaagatagcgaaataaattactttaatgaattactccagggtttcattaaagttctttcgtaatactttgtagtcaaacacgttatgactggcatcaaaaaccacggatttcccctgccagcgggtaatcacctcctccggcgttttcggttgagccggtctggttacgcccatccatgcattaatcagataatcattatacgcagtggaaaaaacgctgttcaccgtctggcgatcgacatgctctcccagtgtcgggctgtaccagataaacatcggaacatgataagcctgctgactgggttttattccaccatgaaaataggcatgttcttttgtcgggtcatactccagaccgtgatctgaaaaatacatgactgatgcccgacgcgtttccagcatggcgaaaatctgtcccaacaaactgtcggtataatgaatggaattatcgtagcagacttcttctgtatccagcggtttaaacacggctttatctctgggccagttactgcagactggctcatgactgcccgtcaaatgcagaacaatcagtttcctgctccccggattactgttcagtgcttcagccaggtgtgggagcagtaactcatcatagcctctgacataaattctgtttctggcccgcatggcgatactggccacagccgttccgttctgtcggaaagcggactgcgcactgagccaccaggtatcgaaccccgcctgattcgccatgttgataatgctatcagggtaattacggatatcatgatgcagtacactatcggcagataacgccagtggaacagccagcgcggtgtaaggtgcgccactgattgcctgagtgaacagtttcagtcgtgatttctgtttctgaagctctggtgtggttgggcgcgaatacccgtaaatggacatgttgtcagtccttgctgattcaccgatgatcagtacaaattcatcaatattattgtctgtaatcatcagctcgtagtgaggtatggtatcagcaatcgtcattaatctctgatgctcctttgcggccagtgcaaaatagttcagattaaagaaggggtatatgtggcaaaccgggaagcgactatgtaaggatcaacttcgtttatttgatactgttttttcaacgcaaactgaaaggaagaatataacgttactgtaattaacgataaaaatgtaattactgtgacctttcccgaaggcaatgaggatgttttatttattgctgaacagggtaatgactccaacttattgatagtgttttatgttcagataatgcccgatgactttgtcatgcagctccaccgattttgagaacgacagcgacttccgtccctgccgtgccaggtgctgcctccgattcaggttatgccgctcaattcgctgcgtatatcgcttgctgattacgtgcagctttcccttcaggcgggattcatacagcggccagccatccgtcatccatatcaccacgtcaaagggtgacagcaggctcataagacgccccagcgtcgccatagtgcgttcaccgaatacgtgcgcaacaaccgtcttccggagcctgtcatacgcgtaaaacagccagcgctggcgcgatttagccccgacgtatccccactgttcgtccatttccgcgcagacgatgacgtcactgcccggctgtatgcgcgaggttaccgactgcggcctgagttttttaagtgacgtaaaatcgtgttgaggccaacgcccataatgcgggctgttgcccggcatccaacgccattcatggccatatcaatgattttctggtgcgtaccgggttgagaagcggtgtaagtgaactgcagttgccatgttttacggcagtgagagcagagatagcgctgatgtccggcagtgcttttgccgttacgcaccaccccgtcagtagctgaacaggagggacagctgatagaaacagaagccactggagcacctcaaaaacaccatcatacactaaatcagtaagttggcagcatcaccgctgaacagaagaacaataaaaagaggataataaacgcaataacataaacgacatacatcctgaacattcttattgcttcatcaggatctgtctgtaggatactgattgcaaaaccatcattaaatgttgtaccaaatgtacaccatgaatacaaactgatactgatatctgccgcggtcagtaatgtgaacggaaaggccagaataaaacgcagcgtaagcgatttcatcgtcttaataataagaagagccaggataaagaataacacccggtagatcagatgcgcgccggaggatacaaggagattagaaagggtaaagacaaccactgataacacaaggcgcttatcattgctaatctgtgaccagtttatgaacggaagattaattttcataataattgagtaaaagcgatatttctgcccggcgctggccgtgaaacataccgtggcagatgaatatatttttctgaataatcataaaacgggcatcatccgccgccacaaatgtagcgacgtaaacaggatcgtcatgatgttttctttcgtgacagaagagaacggcacataccgcccgcaatcattatcagcaggaataacatccccaagacaacgattactcttaatgccggatgaacccgatcggcgaggaaaagtaactccatcccgaaaccaagaacaagccaggccagcaaccacgtgggctgacagagaatcaaactctgaatcagctcggagtcattcccggatcagtacttcatcagatgccaccagtccccgtgtcagtacttcacgacctgacgcaattacccgactcagtacttcagagcccaccgccggtacctgcccggtgatcgcccctgtgcaacaaaataaatcaaccatcgtcagactgcgatcgttcggatgccccgccaccgacgcatcagtatgagttaaccgaaacgatacaaaattgcctgagaatcattacgctggctgatggaaggcacaccaaaagcctctgcacagaacgatgttcggcaacaacagaaacatgattgcgttcatgacaatagtcattcgtaccgttacaggcggtattgatttattacagacaagcggtacatatatgtaccgcttggttaagtaaaaaaacagatatgaacgctattatgttcgttctactttattaaaagcgataacccacgccaatattgaatccattaatagaataattatcgccaagttttgctctggttccttcatatccggcattaattgtaatattacttgtcggattgatcattaccccggcagcataagcaaaagatgtggattttttcgaaatattttctctggcgaaataaccatcaacgtttgtccatgctgttttaccatcagctttaacatgcgccacgccgccagccgcatacagtgacatataatcgttaatgcgccatacggggccagtcagtaaggaataatattttgcatcaacctggtttttaattgaatcgccatatgaatgatattcctgattaccatcccctttcatccaggagaaactgcccataatactaaccggggagtcccattcatacctgtactgcaggtttacccctctaatattcttgaagttctgaattttactctgtgcataaccgacagaaaacgaatggttgtcagccagcacggaaccgcttgccactgataatatgatggctgaaagaactgacagttttttcattttattatctccattgttaatgagagttatttgatgaaataatgatgctaatatttctatctgatgtcaatcactctgaggggggttgatacgtcagaggaacaacagctacattaatatgctatttcaaccggttatcagcattaattacagcatacttgttctgaatatctccgcattcacgatcagctttacgacagacagtcatttctctgtcatttctctgtcaaaagcatgtacctcgtcgtagctgaggtagttattctcaacaacatttcagaaccccttaactttcatgatatgcaacaaaccaatacccaagcctaagatccccgttactttattcgtaccccttataatggggtgttagccagccagacccggcatgattactgcccccagtcgtccatgatccggggggtgatgtcaccgggtctggtggggcgctggtaaccgctaataggggtcaggtcaggcacttttgccgggaccgtctgtaacgtggatgccggtacctgctccccgtggttatctggttaacccatatacaagggagacagaatgaccgaatccagcgattacgaatccgtccaggtctttatcggcgttgatgtcggtaaagatacgcatcacgctgtagccattaatcgttcaggtaaacgcctgttcgataaagcattacccaacgacgaaaacaaactcaggtcgctaatatctgacctgaaacaacatggtcagatactgctggttgttgatcagccagctaccatcggtgcgttacctgtcgccgttgcccgctcagaaggagtccttgtcggatacctccctggactgaccatgcgccgcatagccgacttacacgccggtgaagctaaaactgatgctcgtgacgctgccatcattgccgaagctgcccgtaccctgcctcacgcgctacgcacgctgaaactggctgacgagcaaatcgccgaactctccatgctctgcggcttcgatgatgatcttgccgcacagacaacgcaggccagcaaccgtatccgcggccttctgacccagatacatccggcactggagcgcgttctcggtccgagacttgatcacccggcggtactcgatcttctccagcgatatccctcaccagaaaaactcgcttcgctgggtgagaagaagctggcagcccagctctgcaaacttgcgcctcgtctgggtaaacgccttgcagcagacatagctcaggcactggccgaacaaaccgtcgtcgttcccggcacgaatgccgctgccgtagtactgccacgtctggcactccagctcatcacgctgcgtaagcaaagagacgaggtggcgcttgaggtagaacagcgagttcttgctcaccctctttacccggtcctgaccagtatgcccggagtcggtgtcaggaccgcagccagactcctcaccgaggtcgcctgccgcgccttcgcctctgccgcacatctcgctgcttatgctggccttgcgccggtaactcggcgatccggctcgtcaatacgcggtgagcatccctcgcgacggggtaataaagctctcaaacgggcgttgttcctgtcggccttcgccgcgctcagggatccgatctccagggcttactacacccgcaaaatgagtcagggaaaacgacacaatcaggcgcttatcgccctggcgagacgacgctgcgacgttctgttcgccatgatgcgcgacgggactttttataccccgcaggcgtcataacatgcttgacaacttaataggggcacccctcctcactgaagtgcccggtatggcagtgcgtgcagtaccgctccccataataatcttgatgacattgtctgcagtgccggctggctttacgcaccacgggtaaggcatccggtacgaattgctgcagacgcttaatcagttgtatctccctgcgttctggtctgacataagggcactgctgaccgtgctccgtcagcccgtcgtcagtgtgttcaaaccagggacgttcagtgtcgtattgcgggtggtatctgagtgcactgccgcaaaggtggcaggtgtagcgatcataaggtgcagtctgtgcggtacgggcaccggtcagacgtccgttgccatcaagtgcgagaaaagattttgcgtacatagtatatgttccttagcgccagacgacacgcaggcaacagccgtcccggtacgggcagcctggtctggtgtgaatggcggtttcagtccggtctcagaagggaaaatcagtgtggtggccgtgagcgcgtcatcacactgaggtcagataactcgtctgtcgggctcagctacgactgcagccaaagttgcgctcaccagtggcgtgagctttggtatgttccttcgccagatagtcagcacgttccagcacctgctgaaagccagtgtcatcatcgcgttccagccacaccgccgacgtgtcaggaaaatgcgccaacgtggcataaggcccggcatccccccccagggcactgcaccaggcctgtttaatcatcccggccagtgatctcggagcgcggtaatcgccggcacgacaccaggtatcccggttgaccagcagcaggaggtgatagtgttttttgcctttaagctccccgaattcccgggcccaggcgtaatgcagggtcgtgggatgtacgcgtttaccttcacggcgcttacgcttctggtaagcgtcgattcgggctttcagggcattgatgaagcgggatatcacagctgcgtccgttgctgccggtacatccgggagacgcaggtcaacccgcaatgccgtcagacggggatgaacatccagtgcgcgcagcaccgtctcacggatacgttgttgccagaaggggttgtactcgtatgtcatggttaaatctccgtatggtttcgttcatacggaataaccacgctgtaaaaaatgtgcagagtccctgaagtcatctccaaccgggcaatgtctcaggcactctgtgataacccgaacggtcgtctccggactgacggttgaattttcagcgttgttttttaatgtaaaaaacaggttacggataaggcgtggagagggagcgatcgtgatacgcaaaaagaagtgcagggactgtggtaacgcaattactcataatacggaatgctgcccgagttgcgcgtcaacagcttcctcaggctattaccgaaataccgatcgtctgctctttctactgacgttactgcctgtgctgattctggctgtcgtttcaggcgtcagtgtatttgtactgttgcagtaggttacaggggagggattatccggaatcaacggggcagaacgccccgccgcctctgcgtttgctgtgccagacagtaacgcaccggatccccggtaaatacgagaaaacctcagcagatacaggccgttaatacccgaaaatcagcccatgatcacccacacctccggacaccattcccttttgatttcgaattctttgttgtcgctataccgcttaacgttcccggtattatcctagttcccgacaacagctttgcgacaaaaagaatcgcacagagcagataacacctggtgcaactccgctgtgattaccaaacgttcaggtgacatatttccagacagaagccggaacgcgatcgtaaagtttgttcattgtcagttctgccagccggtgtctaccgcagagctgaaggctttcagcttcgcagggggaagtttataacgtgtgtgggaaatcactttttccggcgtctcccgggataaacaacgacggaaatgctttggttttaacttccattagcctctcatcactttatgctgcaattaacgtgatactgtcagcatactgcaccagactggcattctggtaccctccccaaactcattactcccgtgccaccacttaaccggtatctcagactgacactcaccaggtcggatacgcttaccgctcaaatacactctgttcacgtgtgttgcaggtacgttttatatacgcaggttatacgccagctatcagagatagccctgtgggtacaacgcaatctgctgctactgcgttctcatgcccactgatcgcactcacagtgtttatttcacatatatgaactcatgtatttgagctcatgtgtttcatgtgtttgctctctcttatatatttaataccaatcagacagtcttatcccatcggtgatacctgtcgcctgcccaccggacacgggctgccccatcgtaaccgccccgtaaataactctgcaattatcagaacgacggcattcccctcatcctcccgaaaatcatcccttctctgtcgtgcgtacgcgcgagaagcatcgcttcgcggtggccaccgggtatctcagcatcatgctccctgtttatctcccggcaggaacattcccctactcattttttacgtttcttcccggttgttatgccggtgaaggtggtgcgttgttttcatcaccaacgccggttgagattaacaacatccggaggaacattttcatgaataccccagtttcgctgatggatgaccagatggtcgacatggcatttatcactcaactgactggcttaaccgataagtggttttataagctcatcaaagatggggcctttcctgcccccatcaaactgggtcgcagttcccgctggctgaaaagcgaagtggaagcctggctgcaggcgcggattgctcagtcccgtccgtaattcttaaccgttatccgttcgcctgcagcaggcgcaatctccggcctgccggggcattctgctgcctgttataccccgtaaagaatatgaaaatgaaaccacagtatcagacccgttacgaatcgctgcacgaaagctaccagaaatggctgactggcttcacccggcacgccgtatcctggggcgtgtgtcatccgaatatctactacttccataatctgacgcccgggtgggtgtcattcaatggtgaaaaaccggagattgccattgttccccagagcctgcaccggattattaacggtaatgataaaaaaaccataccgcccctggacgatgatctggtggtaagtttatgtaccagtgaacatctgcttgtgcatcatccgatgctggaaggtgttctgttgtctgaatgtgagcgcctgggacagcattctctggcaaacagactgatcagcctcttccgtcagttcagtggtaccgaactgcgcctcaagctgatctggttgtgctggtatgacttaatgatcggcaacagcctgaaagactggacagagaatctgaaacgcaaatcagaaaaagagctggaggaatggatcatcgaccgtcagaagcagaacgcagcactgacggatctgatggatcagtacgtgctcctggcataccgcacaacggttgacgataaccgcacctgatgccggttgcttcagggaagctggtatccgggcaaggtgcagggctgactgaacggcctgtctgcctgccgtttcgctctccgtgagttctgtcacacgctgcacctgaacgccggactgcgggcacgcagacaggaaaatcgcaggctggaacttctgactggcgggtatcagttatatgcctgttgattcatcaccaccacgcagctcctgagctttagttcatcatcgatattcatacatctgaatatcgatgataaaaatccccataataatcaatcatctaagcctgaaacataatggaggaaaaactgctcaccggttacttcgctctccacttattgtagtaataacccccggtaaaagtcgcagcaacatcagacaactttaaactggctatctggggaagcaggacatagatggtttttccttccggcacgacagaaagcctgaactgagattcaagaatgttcaacagtgcgttcagtttttttctgtttctgaaacgccccgggccacactggagaatataatttttcctgacacggggcgggcattctccgcggcactcctcaatgagccagtcgagcagctcctgtgcgtcctgcagctgcagttcagattcatcaggtaacgcaaataattttttatattcatctgtgtaccacgaacttattacgacagcagacgtcatgatatcggcagtaattttcccttccccctgactgaaatactgcaataatgcagcaattctcgcaatgttttctgttttttttgaaacatgtccccgaaacgcacttaacggaccggagggagataaatcctgctcaagaacattatagtgctcaataaatattttttgcgcttcaggcgaaaaatgcagacaataccgttcatcctcactggatttttcaatactggctctggccagttccattaatcgttcatgaaatgccgttaatgatcctcccggggtcacagctccgttaataaagcgtttcccctgcgtgcttgcaggtttactgataaggcaacgggcaagaaaaccactgtctctggcaacagcaccttttcgctccatatatcggtcaaaaagaccgggttgcaccatgagggataacgtcattctggcattttcaatcatctgttcgggttcattctttctgtccacagacaacactgagccatcccacattttgttaataaaaggcaactcagacagggtatatccatcaaatataataccagcttcatctgacataataccaactgaacgccatttaccacaaagctgattcttaattgccgcagtcgtggcatcattaaaaatgaatttatacctcacaggttcttccgcactgtttttctgaagcacttccagttgtctgagggtttctgactcatccgcgcctttgcggagttctttattcagttttgacaacaatgcttttttctgagcctttaaaagctcttccttgtttttccagaccgccagttcacttttgtatctggaatataactgcatctcctgctggtacaggggcttcattaataatttgtccactgcggtttttcgttctccggactcggcaagcgtcaggaaaaaaagagaaaccggcccccgcagtgtattcagtctgcagacatcaatcagattctggcagacaagtgaaacagcgcccagtgcagatgctgccacaagcccaaggggagcctgcgtaatttgctgagcttcaataacggcatcacgaatgagtggaggcagcgaactcagggggaactcatcacaaggctgaccgaatgacatagtaacctcactacatacagatataaaagcactgcaattctcgctattaatagcaaaaatagcagtcaaatcaatatgaggtaaaaattttggttgatttaatggttaaataataaccacggtgtgttttgctgctgaagaaagacaaaatgaatctgtgtgtcccctccttcccttcggagcacatctgctgttcaaattttacacaatcacgtacaaacaaaaagcatcatcccgggtattgcagataccggtttcctgccgggaagaatcataaacagaaaccccggaataacaccttcaggaagcgacttccctcctgaagaataataaagaagacgataattcctgtcctgaatacgatatttcatggatatgacgccatttttataaatgacaaaaaagcatttaatgctgacacatcaggaaaacaaaataatacccccttgccgatacagataaaacacaccaattttctttgaatgctcacgcataattgtcagacagtgataaaaatgggttatgacaacctttcttcaacaaaaacctgtcttctgttttttacatcagcatcctgcttaaattaaacgtaaacgagcacagcatttctgtaccagaactaaaaatcagccattattcagcaccctcaaccaataaaatctcaacaatattatccggaacagcatggtacctctatcaaaggtttttaacaggacaattaacattactgaacagccatcctgcagaaccactgcaaatataaaaccagggcgcaggataaataatcacaccctgaaaaatgctgtcaaaaacaataataattgcacataatccggaagacaaataccaaacaccccggtatcaacaggtatcattgcgtgcgccactcttataaaaaacacacagcagaagcaagataattataaacgtaattttaatctctctctggcagccccctacaaaaaaacactgaaaaaaaatactcacatcagtaaacatgagcacacctgataatcaggctgtcagaggaatgattttccccttttacgggatagtcagcctgccgttgaacaatgatcaaatcgattcaaaataatttcagacagatattatcgttgtgaatcccccgccacctttccggtgcgcggggttttgtcttttttcaccgggaatacatgtatgaatccgtctgatgccattgaggcaattgaaaaaccgctttccgccctgccttactcactttcccgtcacatcctggaacatctgcgcaaactcacccgtcacgaacccgtgattggcattatggggaaaagcggggccggtaaatcctcactctgtaatgcgctgtttcagggggaggtcaccccggtcagtgatgttcacgccggcacccgggaagtgcggcgcttccgtctgaatggccatggtcacagcatgattatcactgacctgcccggggtgggcgagagccgtgacagggatgcagagtatgaagccctgtaccgtgacattctgcctgaactggacctggtactgtggctgattaaagccgatgaccgtgccctgtctgtggatgattatttctggcgacacatcctgcagtgcggacatcagcaggtgctgtttgtggtgacgcaggccgacaaaacggagccctgccatgaatgggatatggccggtattcagccttcccccgcacaggtacagaacattcgcgaaaaaacggaggcggtattccggctgttccggcccgtacatccggttgttgccgtatcggcccgcaccggctgggaactggatacgctggtcagtgcgctcatgacagcgcttcccgaccatgccgccagtcccctgatgacccgcctgcaggacgagctgtgcacggaatctgtccgcgctcaggctcgtgaacagtttaccggtgcggtggaccggatatttgacacggcggagagcgtctgtgttgcctctgtggctcgtacggttctgcgtgccgtccgtgacaccgtggtctctgttgcccgcgcggtatggaactggattttcttctgaacactctgccagaggaaatgcctgattacattgcgttaaccaactgaaaacatgacacaaacccctcatacccacctctttctcttgcgtgactgctttgctgttaatagaataaaacgatcgataaaacaggtatcgatcgttactatcgatcgtttatagtggttaatggtctgcgaaaaggcagttgaatctcttcatcatgcagaacggaattgcacacaacggactgatacttctctggcggatgagagaggggaagcatttatgtccgggaaaaaacactttatctgaccatgctgttttgtacctgccggtatccacatttgtgggtaccggcttttttattcaccctctgtaaggaaaagctgatgaaacgacatctgaacaccagctacaggctggtatggaatcacattacgggcaccctggtggtggcctccgaactggcccgctcacggggaaaacgcgccggtgtggcggttgcgctgtctcttgctgctgtcacatcagtcccggtactggctgctgacacggttgtacaggtgggagaaaccatgagcgacggaacactggaaaatcatgacaaccagattgtcttcggtacggccaacggaatgaccatcagtaccggtctggagtatgggccggataacgaggccaataccggcggacaatggatacaaaatggcggtatcgccaacaacactactgtcaccggaggtggtcttcagagagtgaatgccggaggaagcgtttcagacacggttatcagtgccggaggcggacagagccttcaggggcaggcagtgaacaccactctgaacggcggtgagcagtgggtacatgaaggcgggattgcaacggataccgtcattaatgagaagggctggcaggccatcaaatccggcgcagtggcaaccgacacggttgtgaataccggcgcggaagggggaccggatgcggaaaatggtgataccgggcagaccgtctacggagatgccgtacgcaccaccatcaataaaaatggtcgtcagattgtggctactgaaggaacagcaaataccactgtggtttatgccggcggcgaccagactgtacatggctacgcgctggataccacactgaacggcggtaaccagtatgtgcacaacggcggtacagcctctgacacggttgtaaacagtgacggctggcagattatcaaggaaggggggctggcggatttcaccaccgttaaccagaaaggcaaactgcaggtgaacgccggtggtacagccacgaatgtcaccctgaagcagggcggcgcactggtcaccagtacagcagcaactgttcttggcagcaaccgtctggggaatttcacggtggaaaacggtaaggctgacggtgttgttctggagtccggtggtcgcctggatgtactggagggccattcagcacagaataccctggtggatgacggcggtaccctggcagtgtctgccggcggtaaggcgacaggtgtcaccatgacatccggtggtgccctgattgcagacagtggtgccactgttgaggggaccaatgccagcggtaagttcagtattgatggcatatccggtcaggccaacggcctgctgctggaaaatggcggcagctttacggttaatgccggaggacaggccagcaacaccactgtcggacatcgtggaacactgacgctggctgccgggggaagtctgagtggcagaacacagctcagtaaaggtgccagcatggtactgaatggcgatgtggtcagtaccggcgatattgttaacgcaggggagattcgctttgataatcagacgacaccggatgccgcgctgagccgtgctgttgcaaaaagtaactccccggtaacgttccataaactgaccaccagtaacctcaccggccagggcggcactatcaatatgcgtgttagccttgatggcagcaatgcctctgaccagctggtgattaatggtggtcaggcaaccggcaaaacctggcttgcgtttacaaatgtcggaaacagtaacctcggggtggcaacctccggacagggtatccgggttgtggatgcacagaatggtgccaccacagaagaaggtgcgtttgccctgagtcgcccgcttcaggccggcgcctttaactacaccctgaaccgtgacagcgatgaagactggtacctgcgcagtgaaaatgcttatcgtgctgaagtccccctgtatgcctccatgctgacacaggcaatggactatgaccggattctggcaggctcccgcagccatcagaccggtgtaaacggtgaaaataacagcgtccgtctcagcattcagggcggtcatctcggtcacgataacaacggcggtattgcccgtggagccacgccggaaagcagcggcagctatggcttcgtccgtctggagggtgacctgctcagaacagaggttgccggtatgtctctgacgacaggggtatatggtgctgctggccattcttccgttgatgttaaggatgatgacggttcccgcgccggcacggttcgggatgatgccggcagcctgggcggatacctgaatctgacacacacgtcctccggcctgtgggctgacattgtggcacagggaacccgccacagcatgaaagcgtcatcggacaataacaacttccgcgcccggggctggggctggctgggctcactggaaagcggtctgcccttcagtatcactgacaacctgatgctggagccacaactgcagtacacctggcagggactctccctggacgacggccaggataacgccggttatgtgaagttcgggcatggcagtgcacaacatgtgcgtgccggtttccgtctgggcagccacaacgatatgacctttggcgaaggcacctcatcccgtgcccccctgcgtgacagtgcaaaacacagtgtgagtgaattaccggtgaactggtgggtacagccttctgttatccgcaccttcagctcccggggagatatgcgtgtggggacttccactgcaggcagcgggatgacgttctctccctcacagaatggcacatcactggacctgcaggccggactggaagcccgtgtccgggaaaatatcaccctgggcgttcaggccggttatgcccacagcgtcagcggcagcagcgctgaagggtataacggtcaggccacactgaatgtgaccttctgacagaaccatcgcctctctgtggtcccggtcatcatgaccgggacccggaccggcgcaacggatcttcaacgccacattcgctggcattaacaataaaatgatattcatcacggagtgactatgttacagatagtcggcgcgctgatcctgctgatagcaggatttgccattcttcgccttttgttcagagcattaatcagcacggcttctgcgctggcagggcttatattgctgtgtctgttcggcccggccttactggctggctatatcatcgaacgcataacccggttgttccatattcgctggctggcaggcgtatttctgacgattgccggaatgatcatcagcttcatgtggggacttgatggtaaacatatcgcgctggaggctcacacctttgactctgtgaaatttattctgaccaccgctctcgccggtggtctgctggctgttcccctgcagatcaaaaacattcagcagaacgggatcacaccagaagatatcagcaaggaaattaacgggtattactgctgtttttatactgcctttttccttatggcgtgttctgcatgcgcaccattgatcgcgttacagtacgatatttcaccgtcactgatgtggtggggcgggttgttgtactggctggctgcattagtgacgctgctatgggcggccagccaaatccaggcgctgaaaaaactgacctgtgccatcagccagacactggaagaacaaccggtgctcaacagtaaatcgtggctgaccagtttgcaaaacgattacagccttcctgactcactgacggagcgcatctggctgacgctcatttctcaacggatttcccggggagagctgagggaatttgaactggcagacggaaactggttactgaacaatgcctggtatgaaagaaacatggcagggtttaacgaacagttgaaagagaacctgtcattcacacctgatgaactgaaaacgctcttccggaaccgcctgaatttatcaccggaagcgaatgacgattttctcgatcattgcctggacggcggtgactggtatcccttttcagaaggtcgccgttttgtatcattccatcacgtggatgagcttcgtatctgtgcctcctgcgggctgacagaagtacatcatgccccggaaaatcataagccggatccggaatggtactgctcctctctttgtcgcgaaacagaaacactgtgtcaggaaatttatgaacgcccctacaacagttttatttccgatgcaacggcgaatggtctgattctcatgaaactgccggaaacctggagtacaaatgagaaaatgtttgcttccggagggcagggacatgggtttgccgctgaacggggaaaccatattgtcgacagagtccgtctgaaaaacacacggatcctcggtgataataatgccagaaatggagcagacagactggtcagcggaacagaaatccagacgaaatattgttcaactgcagcccgtagcgtcggtgcggcattcgacgggcaaaacggacagtatcgtttcatgggaaataatggccccatgcaactggaagtcccccgtgatcagtatgccggcgctgttgaaaccatgaggaataagatccgcgaaggtaaagtacccggtgtaaccgatcccgcagaagcgtcccggctgattcgtcggggacatctgacttatactcaggcccgtaatatcacccggttcgggaccatcgaatcggtcacttatgatattgccgagggttcggttgtcagtctggcggccggagggatcagttttgccctgacggcatcggtcttctggctcagcaccggcgatcgcgatgttgccctgcagacagctgctgtccaggcaggaaaaaccttcacccgcacactggctgtctacgtcacaacccagcaactccaccggctcagtgttgttcagggtatgctgaagcacattgatttttcgactgccagcccgactgtccgactggctcttcagaaggggaccggtgcaggaaatatcagtgccctgaacaaagtaatgaagggtactctggtgacatctctggcactggtagctgtcacaaccggccctgacatgatcaaaatgttgcggggacggatctccggtgcgcagttcatcaggaatcttgccgtggcatcttccggtgtggcaggtggtgctgtcgggccagtggcgggcggaatactgttcagtccactgggaccatttggtgcactgacagggcgtgtggttggcggtgttctggggggaatgattgcctccgctgtatcaggaaaaattgccggagcgctggttgaagaagatcgcgtcaaaattctggcaatgattcaggagcaggtgacatggcttgccggcagtttcctgctgaccggacatgagattgaaaatctgaacgagaatctggccagtgttatcgatcagaatgctctggagatcattttcgccgccggtatacaacaacgggccgcgaccaatatgttaatcaaaccactggtggtcagtatcatcaggcaacgccccgtcatggaatatgaagcatcccatctcggcaatatggttaaccgactggaagaagcattacccccggagttaccggcataacggctattctgcgccttttacgttttatcacctgatttgccagtgtcatcgtcatgactcagagaggtaaataccatgattcacctgttcaaaacctgcatgattaccaccttcattctggggttaatgtggtctgccccactccgggcacaggatcaacgttacatcagtatacgcaatacagatacgatatggctcccgggaaatatttgtgcttaccagttccggctggataatggcggaaacgatgaaggatttggccccctcaccatcactctgcaactcaaagacaaatatggtcagacgctggtgaccagaaaaatggaaacggaagcttttggtgacagtaatgccacgcgaaccacagacgcatttctggaaacggagtgcgtggaaaatgtcgccacaaccgaaatcattaaagcaactgaagaaagtaacggccatcgtgtcagtctgccgttatcggttttcgatccccaggactaccatccactgctgattaccgtttccggaaaaaacgttaactgatccctgaagtcagtttcatgcttcagcctctgtcacaacgcgtggcagaggctttttatttatcaggagaaaacagatatgccgggttacacagagtatgtcctggctgaaggatctttctcatacgggcaggcggttgctgtcataacagcttaccgcaatgtgtttatccaggatgacccgggaatgcatttccgtcgggttatccgcaacgcggaaggtcagcgacgctggcgctgccggaattctgaacccgatgccggaaaggtgcttaatacgcggctcgccagtgacggtcttctcagacaataaacgtcattcatttcacccatcaggccgcgtcttctccgggagacgtggctttttcatttattacaccagtaaatcttaaccaccgataaggagcaaattatgcgactagccagtcgttttggttatgcgaaccagatacgccgtgaccgtccgctgacacacgaagaactgatgcactatgtgccggggattttcggggaagataaacacacgtcccgaagccagaactatacgtacatccccaccatcaccgtactggaaagcctgcagcgggaaggctttcagccattcttcgcctgccagacccgtgtgcgcgacccgggccgccggggatacacaaaacacatgctgcgtctgcggcgggccggagagataaacggagaacatttccctgaaattattctgctcaactctcatgacggtacctccagctaccagatgctgccgggttacttcaggttcgtctgccagaacggatgcgtctgtggtcagtctctgggggaagtgcgtgttccgcaccggggaaatgtggtggacagagtcattgaaggggcttacgaggtggtgggggtttttgaccggattgaggaaaagcgtgatgccatgcagtcgctgattctgccgccaccggcacgccaggcgctggcacaggcggcactgacttaccgttatggtgacgaacatcagcccgtcaccaccgctgacattctgacaccgcgacgcagggaggattacggtaaggacctgtggagtacttatcagaccatccaggagaatatgctgaaaggcgggatttccggtcgcagtgccagaggaaaacgtatccacacccgtgccattcacagcatcgacaccgatattaagctcaaccgcgcattgtgggtgatggcggaaacgctgctggagagcctgcgctgatgcagcctgtccctgaaggcgctgccgggatgtcgttccatttctgatgatgacctgtgcgcctggtatacccgtttgctttaccgtcccggagaaatcagtctgtgcagactgagtacaggcaatggcatcaggccatccgtctgtgaccggaacggttacgcgtacggctgtccggaatttcagccgaatatcattcatccctgatattaccgggtctcacggtcagtgatgaacgtgatgttatcagccacccgacctttacttcctcgcatttattcacactacaaggatttcacatatgaaaacattgtctcagaacaccacctcttcggtctcagcaccggagactgacctgcaacaactggttgccagcctcgtccctgatgaacaacgtatcagtttctggccgcagcactttggcctcattccacagtgggtgaccctggagccccgtatcttcggctggatggaccgtctttgcgaagactactgcggtggtatctggaatctgtacaccctgaacaacggtggcgcatttatggcccccgaaccggatgacgatgatgacgaaacatgggtactgttcaatgccatgaacggtaaccgcgctgaaatgagcccggaagccgccggcattgctgcctgtctgatgacgtacagccatcatgcctgtcgtacggagtgttatgccatgacggtccattattaccggctgcgggattatgccctgcagcatccggaatgcagcgccattatgcgcatcattgactgaaaggggccggaacaatgcaacaactttcctttctgccaggagagatgacgcccggcgagcgcagtctcattcagcgggccctgaaaaccctgggccgccatcttcatgaacccggcgtggccttcacctccacgcatgcggcacgggaatggctgattctgaacatggcgggactggagcgtgaagagttccgggtgctgtatctgaacaaccagaatcagctgattgccggtgaaaccctcttcaccggcacgatcaaccgtacggaagtccatccccgggaagtgattaaacgcgccctgtaccacaatgccgctgccgtggtgctggcgcacaatcacccgtccggtgaagtcacccccagcaaggcagaccgccttatcactgagcgtctggtacaggcactggccctggtggatatccgggtaccggaccatctgatagtcggtggcagccaggttttctcctttgccgaacatggtttgctttaacccgtcacaaccacatcacacctgttttcacttttatcttctgtcttcagaggtatcccattatgaaaatcatcacccgtggtgaagccatgcgtattcaccaacagcatcctgcatcccgtctttttccgttctgtaccggcaaataccgctggcacggcagcactgaaacgtataccggtcgtgaagtgcaggatattcccggtgtgctggccgtgtttgctgaacgccgtaaggacagttttggcccgtatgtccggctgatgagcgtcactctgaactgagtcagtaagggcattctgatgagcagaattatcaccaccaccgtgtatacactgcatgagctatcctccaccgcacaggaaaaagcccgcgactggtaccgtcagcatcatgctgacagcaactggtatgaaaacgtgtatgaggacttcagggcggtctgtggcattttcggaattgacctccgccagcgcgttttccggctcagcaacggcaggtttatggaagaggcgtgcatctggttcagcggattctgcagccagggggacggagcctgttttgaaggacgctggcactggcagccagcaacagccaggaggctccgggagtatgccacacaggaccatgaactccatcgtatcgcggatgccctgcaggcggtgcagaaacgtaacttctggcaactgcaggctgaaatccaccaccggggacgttactgccatccgtacagcatggatatcactgttacccggaacagtccgactggtcaggctatgacagccgatgcggaagccgctgtcagcgaagccctgcgcgacctggccttctggttgtaccgtcagctggaaaacgagtacgacaggctgacctctgatgccgctgttgatgaggcccttctcatcaacgaatacaccttcaccgaagccggtctgcgcgccggctgacctgaggactttatcgtgtcagacaaactccatgagacaaattatcccgacgaccataacgaccgcctctggtggggactgccctgcaccgtgacgccctgtttcggggcacgtctggtgcaggagggtaaccggttgcattaccttgccgaccgcgccggtatcagaggcctgttcagcgatgcagatgcgtaccacctggaccaggcctttccgctgctgatgaaacaactggagctcatgctcaccagcggtgaactgaatccccgccatcagcataccgtgacactgtatgcgaaggggctgatctgtgaagccgacaccctcggctcctgtggttacgtttatctggctgtttatccgacgcccgaaatgaaaaattaactctccagaatagccttctgctacggcctggtgttttcaccacgccactttcccatttttcatctctgcatatcaggaaaatcttcagtatgaacacattacccgacacacacgtacgggaggcatcgcgctgcccgtctcccgtcaccatctggcagacactgctcacccgactgctggaccagcattacggcctcacgctaaatgacacaccgttcgccgatgaacgtgtgattgagcagcatattgaagctggcatttcactgtgtgatgcggtgaactttctcgttgaaaaatacgcgctggtacgtaccgaccagccgggattcagcagctgtacccactctcagttaataaacagcatcgatatcctccgggcccgccgggcgaccggcctgatgacccgcgacaattacagaacggtaaatgacattacccaggggaagcatccggaggcgaaacaatgaaactggccctgacgctggaggcagacagcgttaacgtgcaggcgctgaacatggggcgcattgtcgttgacgtcgatggtattaagctcgctgaactgattaacaaagtcgctgaaaacggttattcactccgcgtggtggatgaacgtgacgctacagaaacaccggcaacttctgccagccctcatcagttgccggaagacaatacagtgatacagagcgtgatgccattaaccactgaaacagcgctggatatcctcattgcgtggctgcaggacaatattgactgcgaatcggaaattatctttgacaacgatgaggataaaacggattcggcagcactgttgccctgtattgaacaggccagggaggatatccgtaccctgcgccaactgcagcttctgcaacagaaccggtgagtcttactcaccagacttcattccactgacgccagcctgaacagggctggcgttttcatttatctgcaaaaaggaatatcgattatgtctgaaatcacagccccccgtccggaagtggtcaacgggcatacggacgttatctgctcaaccagtatccgccacattctggctgtacgaaagagtacgctgctgcaaatcgacacacttacccggcaactggcagaaatctcagcaatgacagaaagtattggcggtaaaaccgcactggactgggcgatgaaacaggattttcgctgcggttgctggctgatggaaaaacctgaaacggcaatgaaagccatcacccgcaatctcgatcgcgaaatctggcgtgacctgatgcaacgttccgggatgctgtcattaatggatgcgcaggcccgtgagacatggtaccggtcactggaatacgataattttccggaaatcagcgaagcgaacattctgagcacatttaaacaactgcaccagaacaaagatgaaggtaagcggctcgccagaaccgtattgatatttactgagaggtcagatcaactttccagggcaacagatcgcgtacccggtttgccggccaatcctggatatgctcaatgacgtaacgcagccatttttctggttccacattgttcagacggcatgtgccgatcagcgagtacaacaccgccgcatgttcgccaccgctgtcggaacccgcgaagagccagtttttccggcctacggccactccccgtaaggcgttctctgcgatgttgttgtcgatttccacccagccattactgcagtacacgttcagggcctcccactgtttcagcaggtatgcgaacgcttttgccgtatccgagtgacgcgacagtgttttcatctgttcctgtatccagtcatacagtgactgcatcagtggagccgctctggcttttcttgctgccagacgctgttctgctgaacatccccggacttctgcctctatggcatacagttcaccgatacgctgcagggcttccgtggtgatgtcggtgggcactcttgcatgcacatcgtggatttttctccgggcatgagccatacacgcggcttccgttattctgccggattcgtataacacccggtaaccaccgtaagcatcggcctgaagcacaccgctgtaaccggccagatgattttgtggatggatacctttccggtccggtgagtacgcgaaccagaccgccgggggcatttccgaaccggcgttacggtcatcacggacgtagacccacagccgggcggtccgggttttaccgctgcccggctcctggaccgggacggggatatcatcagcatggactttaccgggcatcagcacatactggcgcaggacgtcatacagcggctccagcagttcagcaacggcacctgtccagcgccccagcgtggcgcggctcagctccacgccctggcgacggtatatttctgactggcggtataacggcagatggtctgcatatttcccggtaacaacatgggccagaagccccgctccggcataactgcgtgcaatgggttttgaaggtactgttgcctgcacgatatggtcgcaccgacaacaggccagtttcggacgttgtgtttcgataaccttaaaggcgctgctgataagctccagttgctctgacacatcacaccccagaggactgaggtcaccaccacaggccgggcagcattcctcttccggccggatgacccgggtttcacggggaagtgaggccggtaacggtttacgggctgaagactggcgcagggcggatggcagtaccgggtcatattgctcacccagcgtttccgccatttcttcctgaagtgcgctgattcgctcctgtgcttcctgtatctgccgttcggttttagcgcgaagtttttctgagcttttaccgaactgcatgcgctgcagtttcgcaaccagcgccttcagccggttgatttcggaagcataagccgccacccgctgtgagagcaggcggttgtatttcgccatctggcggatggtgtcctgttgcgtctgcaacagtgcccgcaggcgggcattctcatgagcaagtgaggtgtccatatcctcactttacaacgggttatatgcggatgccagcgcgttccgttcgtttcgggtgcttccagtcgatgccttcgagaagcatggacaactgagccggagtaaggtgaacctttccatcgcgggtgaccggccagacgaagcggccccgctccaggcgtttggtgaagaggcacagtccgtcactgtcagcccacagcacttttatctggtcaccccggcgtccgcggaagatgaacagatgcccggagaacgggtcatccttcaggacgttctgaacttttgaggccaggccgttaaagccatttcgcatatcggtgataccggcaaccagccagatacgcgaaccggcagggagagatatcatcagtggctgctccctttcatttcgcggataagtgtctgtaataacgccggtgtcagttcacctttcagcctgagagttccggccggcagaaccagctcgcagcacagactgtctggcagtgtatttatctgttcaggtatctgcactggtgccgggattttattatccggctccggagttaacgtcacgggaagtagcgatgtttcatgttcgccgggcggttgcaggccaccgttacgccagagatgccgccagttaaagagcaggttatcgttaattccattctctcgagctatttgtgcgacacaggcaccgggtaaaagagtttgctgaaccagtctccatttaaactccggtgaaaatcggttccggcggggtttctctgctttcacaggctgagtcacggtcggggctgaagggtatcgccccgggaaaagagcccgggccagttgcccgcaggaatattcaccggaaagaggccagtcagtgaatacctggtgaaatcgcctcaccagagaaaaaatggtggttttgctgacaccggtctgcgcagaaatgcgcgggtacgacagtgactcgtcaaatctcagctgtagcacacgcaggatcaattccggattgtctgccagtaccgcttttcgtgcattcatcttaaatgtccctttactgcgaaaatggacattagtatcggaaacaggaaagggaggcgaaagacggtttaaatgagacggttacgcgagagtaattcccccagactttataagctaatttttttcgtgaaggttattgtcagatccaaaagcaaaaacccgccttgtgggcgggttcttaagaattagtggtgccggactcggaatcgaagattgcttctatcatgttgatataaatctgatttgtttggtttggtgaaaaatgtaccctcttttgtaccctcagttccttttgctgcgaaaaaggaatcaaacccggaaattgggagatgaggtgaaaagggggacgcatatcctggcccatttcagtatgtgttatctctggtttttgccgtttctgctgttgtatacccactcagcaataaactgttccgcgggtagtggaggtgcatagcggtatccctgcagatagctgcttcctttctctgtcatgaacaactcctgtgattcggtttcaatgccttcggcaatgatatcaatacctaaccgacgagccagctcaataacattttctactatatgcccggagatttcatccacgccgaccatttgtacaaaccctttgtcgagtttgatgtaatcgacaggaaacgactgcaggtagctgtgggttgcatagccagtaccaaaatcatccagagcaaacaatactccctgttgatgtaatttcgcaaataacgcttttgattctgctgtgacggatagctggtttcgttctgtcagttccagaaccagtttcactttccctttcgggaaggtggatagaaactttatacagctatcttccagccccggggacagaaaatgcgctggtgaaatattgatcccaatatgaaattgatctggtaaaaaatgtgcaacaggattaaggctatgttcgacctgagacatcaactgttgcgttatcggggcaattaatccggtggactctgccagcgggataaactgatctggtgggataatcccgctgacggggtgatgccagcgaatcagtacttcgcagccggtcagctggtgatttttagctgaaatgatgggttgaaaataaggtctgaactctccgtgagcaagtgcatttttcagcatatcgagcggggtggatggacgacggcgggacagcagaaaggctgtgagtattccaccgaagatggcaacagggaacatataccaggcctgtctccaggcgtagataagttgcattttcaccgggatggtataaatcagggagaacggatatttttttgaatgactttctttttgtatgccgctgtcgtccgggagcagagtgacattttttccgctggctgacaggaccgtgtttcccaaacggaattgtattgcaggaaccgcatgaaccacagagatgatgtcctgaataaaataataatccgtggcggtaatgaccgtaccgtttttgtaaggtgtttttaacaggatccagggcagagtacctgtatcttcaggaaaacgaatcagcatatcgtgccgccaccgttccttttcagcaactggaccgacaggcaaaccggggtgggtgctgcaaaatacagcctcttgtcttgccaggcttagtgcacgaagttgggggcgcttcagcagcagattgcttaattcacgctgagtatctgcgttacagttattcagaagcaaatgttctgcttccgggctgatgctgttgttctgattgagaatgttttctatatagccaagtgcgaaattaactctggtctggctgtcattcaccagctctgcttttttccagaaaaatgtcagcagaacaatgaacagaaataccaggccacctgccaccatagctggagtatgtttttttacaaataatctggaaaacatggttttttgctctgaatgacgccagatttatcagaatgtttttgtgtatgtactgagtctgtgctttgggttaaacggacgataaggtttccggatagtatttcgcaataatatcattcagcctgtcaaccagttctggtttcctgaacgtgatgtgcgcggagcctttcttaaagtatctgatgctgaacatctcatcttcatagcactctttaccctgaacagaccggatgtgatcatccagatgaatggttatgttttcccggttgtcggggatcggtttaccgctgaacaggtgcaacattctttccagatcggcgagtcggtcagcctgttgcccggtgataagatgaaatccccaccggtcccaccttaccaggttgttaatgataattttactgccaaatttacaggggcaattagttttgtaattccagctcagtcccctgaagacgttgatcacccctcgctcaaacacttcatctgtaaccgtctcatttaaaccgtctttcgcctccctttcctgtttccgatactaatgtccattttcgcagtaaagggacatttaagatgaatgcacgaaaagcggtactggcagacaatccggaattgatcctgcgtgtgctacagctgagatttgacgagtcactgtcgtacccgcgcatttctgcgcagaccggtgtcagcaaaaccaccattttttctctggtgaggcgatttcaccaggtattcactgactggcctctttccggtgaatattcctgcgggcaactggcccgggctcttttcccggggcgatacccttcagccccgaccgtgactcagcctgtgaaagcagagaaaccccgccggaaccgattttcaccggagtttaaatggagactggttcagcaaactcttttacccggtgcctgtgtcgcacaaatagctcgagagaatggaattaacgataacctgctctttaactggcggcatctctggcgtaacggtggcctgcaaccgcccggcgaacatgaaacatcgctacttcccgtgacgttaactccggagccggataataaaatcccggcaccagtgcagatacctgaacagataaatacactgccagacagtctgtgctgcgagctggttctgccggccggaactctcaggcttaaaggtaaactgacgccggcgttattacagacacttatccgcgaaatgaaagggagcagccactgatgatatctctccctgccggttcgcgtatctggctggttgccggtatcaccgatatgcgaaatggttttaacggcctggcatcaaaagttcagaacgtcctgaaggatgacccgttctccggacacctgttcatcttccgcggacgccggggtgaccagataaaagtgttgtgggctgacagtgacggactgtgcctcttcaccaaacgcctggagcggggccgcttcgtctggccagtcacccgtgacggcaaggtgcaccttactccggctcagttatccatgcttcttgaaggtatcaactggaagcacccgaaacgaacggaacgcgctggaatccgcatataacccgttgtaaagtgaggatatggacacctcacttgctcatgagaacgcccgcctgcgggcactgttgcagacgcaacaggacaccatacgccagatggctgaatacaaccgcctgctctcacagcgggtggcggcttatgcttccgaaatcaaccggctgaaggcgctggttgcgaaactgcagcgcatgcagttcggtaaaagctcagaaaaacttcgcgctaaaaccgaacggcagatacaggaagcacaggagcgaatcagcgcacttcaggaagaaatggcggaaacgctgggtgagcaatatgacccggtactgccatccgccctgcgccagtcttcagcccgtaaaccgttaccggcctcacttccccgtgaaacccgggtcatccggccggaagaggaatgctgcccggcctgtggtggtgacctcagtcctctggggtgtgatgtgtcagagcaactggagcttatcagcagcgcctttaaggttatcgaaacacaacgtccgaaactggcctgttgtcggtgcgaccatatcgtgcaggcaacagtaccttcaaaacccattgcacgcagttatgccggagcggggcttctggcccatgttgttaccgggaaatatgcagaccatctgccgttataccgccagtcagaaatataccgtcgccagggcgtggagctgagccgcgccacgctggggcgctggacaggtgccgttgctgaactgctggagccgctgtatgacgtcctgcgccagtatgtgctgatgcccggtaaagtccatgctgatgatatccccgtcccggtccaggagccgggcagcggtaaaacccggaccgcccggctgtgggtctacgtccgtgatgaccgtaacgccggttcggaaatgcccccggcggtctggttcgcgtactcaccggaccggaaaggtatccatccacaaaatcatctggccggttacagcggtgtgcttcaggccgatgcttacggtggttaccgggtgttatacgaatccggcagaataacggaagccgcgtgtatggctcatgcccggagaaaaatccacgatgtgcatgcaagagtgcccaccgacatcaccacggaagccctgcagcgtatcggtgaactgtatgccatagaggcagaagtccggggatgtacagcagaacagcgtctggcagcaagaaaagccagagcggctccactgatgcagtcactgtatgactggatacaggaacagatgaaaacactgtcgcgtcactcggatacggcaaaagcgttcgcatacctgctgaaacagtgggaggccctgaacgtgtactgcagtaatggctgggtggaaatcgacaacaacatcgcagagaacgccttacggggagtggccgtaggccggaaaaactggctcttcgcgggttccgacagcggtggcgaacatgcggcggtgttgtactcgctgatcggcacatgccgtctgaacaatgtggaaccagaaaaatggctgcgttacgtcattgagcatatccaggattggccggcaaaccgggtacgcgatctgttgccctggaaagttgatctgacctctcagtaaatatcaatacggttctggcgagccgcttacatatcaatacggttctgacgagtcgcttacactctcgccacgttaacgagagtaattttattgatattaatctcctgatactttacccccgtccaaactccagccgctgcacattcaccatcccaggcttctcagcagcactgacatcaatttgtgtcacccgcagcgcatatttttcatccagtgcgtttaaccatttcagcaggtcattaaacaccacaggttctatccagacctgaatattctccccacgatcggctatccgcctgatgaccaccgagtgcgcggaagcactgtcactgatgacccgcgatacctgcgcaggcgttgttgtggcagattttcgcgctgcaataatatccggcgcggcgttcttcagtcgggtgttcatcgccaccagctgctgcaatattgtctcctgttgctcaatccgttcgctcaacggctgccagatgaggacgtaatatccgacgctaaacaggaacaccaccgctgccagtaacatgcccttttcacgcggagaacgccccgccaggtgttgtgccagccagtgttcgccacggcttaactggcgttcacgccattgctgaaaatagtgaataaatttatcgcgtaacatgttatttcctccgcaacgttacgccgccggaaaccgcatcaccctctttctgtaacgcgtcctgttgcacaacataatcggttgccagtgcactacgcagtttgtcgaaactggcaaagttcgcggcccgtagctggaggtgaagtatctggcgtttttgatcaaaggtaaaaccacgcatttcgatgtcggaaagtgacgctgatttcagggtgctggctatcgctgacaactcggcgagcagccgggtatcgtcggcctgtgggcgatattttttcagcgccatcgtcacctgagagcgtaaattcacaatccgcttctgctccgggaacaacgttaagaactgttcctccgcctgggtgcggctttgcgccacctgttcgctgacgctccataacgtcacgccccgctccactgccagcgcaaccagaatcagcaatatcggcagaatcatcacccgccagcgcgcccactgttttcggtagctgacgcgaggctgccacggccctgtcagcaggttcccttccggttcgccataagtggtaatggcgggcagagctgtaacggtcaggcgttcagcgtctgcgccagcccatgctgatagcttttccggtgcaatgccgactacggttagcgaaagcggtaaatcctgctcattgagctgggcgcggaacatgaccggagccagcgccagcccggcgctccatccccggcattcatcgatgcggcagataacccgttgcgcatcgcaagccataaacccacaaggaatggacatccagtccggcgcgacggtagcgcgggtgatgccgttttcctgcaaccactgcgcaatgttgcgcatatgctgttggtgaatcactgctacggttgccagttgctggtcgatattcaacggggcgaaatgcagttcatcgatatcctggttcagctcttcttccagtaaggcgggcagaatagtcggtatctgcttgcgggcgacatcaggcagttcaacctgccagacgctgatccattcgccgggaatgtagagtcgaatcgcatcggtttgcagccattgctgaagctgttcgtcagcaacgtcaggccagataccgtgttccacgtcgggtgtacggcgctgccagcggacggtatcggaggcgcaaagcgggaaaaaaatctcaaggatggaactcactcactttctcctgtctgatgccagagaaccgaaaagtgttgtgggcccatgcggacaattaacgagttcatcgtcagttcaatctcattcacggtgatatctgaacgcagccagaagtaattgctgtccacgctcaggacggtttttagctgttttttagtacgctcatcgacgtcagcaagtagcggctgtgcaagaaactgatcgacatcttcccagcccttcgccggacgttgttgtaataacgcccgcgcctgaacagggcttaaccacgggtcaaacagcgcctcaagaatcacactttgcgtgacgtctaaggtattgatgttgatttgctggcgggtcatcggcagcgcacagaccagcggtttcagtttttgataaagcccggcgtccattccctgcaccacgcgcatctcgctgatatcggccagcggttgattggcggcgtagaacggcaccgagcgggcgagatactcgctgtcttcacggcccagacgcgtctgcacgctgcggtcctcgtcaataaactcccacaggctttcggctatcagttcggcccgataagcaggcacatcgaggcgcgagatcagggcaatcaactgttgtaccgcaagcggacgcgacgccgttgtcggctgagcgagggcattcaggttgaagcaagcctgtgcgtcacgcagggtgaccgcaatttgcccctgcggcagagggaagaaacgagggccggatgcccacggctgtgccagatgcacgcgcttttcatttttcaggctcagactgagcgcgctcagcgccaggctttccgcactggcgctgtaccacagcgcctgctggtactcctgctggctgcgcgttcgcccaagttgttgctgcatccgcccggaaagcgtgatggttaccagcatcataaccgccagcaataccagcaccacgaccagtgccattccgcgttttggtggtgaggtgatcatgattattgcggcccgcgtaacaaccagatgcgttcaatctcgccccattgcggcgaatgcagggtcatgcgtaccgccacagggatcgcctgtactgacgaccagctctcctgccagcgcgtgccgtcgtagaactgcaaacggagcgaatcggccggaatcaacttttgcattgtcggcttcacgctgcctgcggcatcggtcagcggccaggctaaccgttcgagataaccgtcatgaatgcggtaaccgacggtgagcagattactgcgcggcagacgcatcaacgggttaaccacaccgccgcgcacaaaacgcattccttcactctcagacgccagcacgccagcgccagccagtaaagctggttcacgctggccctgatcgcctcttaccggacgcggcatcatttgggtcagatcgtgggtcagaaaactcatcgtttgctgcatgaggtttagtttttgatcgtgatcggcgacggcgctattcacgcgcgtgacgccgttagtcacctgctgcgccatcagtgccagcgaggcaaaaatggcaattgccaccaacatttccagtaacgtgaaaccagcgcgagtccttctcactgttggcctcccacggcgctaaaccaggcgcgtcgtgactgaatgaccgacgaaaagtcttcgtgaaggctgacttcaatatccaccgcctggagcagcgcgttgcctgtactcagcggtgtggttcgccagtaccagcggcttcctgccatatcgctctcgccctgctgcctgaccgcccgctgcccacgggtcatcaggtagagcagcgcagtctggttttcagccacccagcccgctaccgttttttcctcaagaacgtgctgattactcagcgcaccgctggcaatctgtaataccgccgtggcagccagcgcaaaaatcgccagcgcgagcatcacttccagcaaggtaaatccgcgcttcatggcatcctctcatcacattgattgagggataacgcgccatcgtgcgccagttttaccgcccaacatgcgttttgcgccgccgagtagaagcgcagcgtaaacggcgtggcgggttcaaaaggcgaaaaacggatctgcggcgtcttctttttcgcctctttttgcagctccagttcaatatcgtgcagcgtcaggcgacgacgttgcagctccagcgcatactccttctgccagatatcacttccgggttgtaacagcatctgcacctgttttggcaccgtaacctgtgccgataaccgggtcgcggaaacgggcaaccactgcccctgacgacgctgcataaactgatagccaggcgcgtcgattagcacaccgagtgtctgcccttcaatcactgcccagtccttaaactgcgcaaagcgagtcagaaaatcctgtgccgcttttttcgcgggcggttcagaatcggtcgcaaacgtctgtaccacgcccgaactggcaaggccgataaggaaaatcaccaacatgatttccagaagtgtgaatccgcgttcaggcactgcttactgaaactcctgcaaattccagttaccgatatctgcgccagcgccttccccgttttcctgaccatccgcccccagggtataaacatcaaacagccctttttcacccgggctgagatactgataatcattgccccacggatcctttggcagtcgtttaatgtatccaccagtacggtagttgcgggcgtccgccatattggctggctgctggatcagcgcctcaagcccctgttcggtagttggataacgcccgttatccagtcggtacatatccagtgcgttttccagcgccacgatatcgctgatggctttttgccgatccgctttctctttattgcccaacaggttaggcaccaccagacttgccaggacgccaagaataacaatcaccaccatcacttccagcagggtaaaacctgcccgtggtttttgtgtgcgggataacgaattcatgtgataactccgtaaattacattccaaccatattgttcagttgcagcatcggctcgaggatggcgatgacgataaacagcaccacgcccgccatcatcaccaccagcgccggctcaaacagccccaacgccagccccacctgggtatcaaattcccgctcctggttaactgcggcctgttcaagcatggtttccagttcgccgctctgttcgccggaggcgatcatgtacagcatcatcggggggaacaggcgcaactccgccagcgcagcgcgcagactgcttccttcgcggacgcgatctgccgccaacagcagttgttgctcgacatagcgatttgccgacacggcggcagcggtctgaatgccttccagtagcggaacactgctggcggtgaggatgcttaacgtgcgggaaaaacgcgccgtattcagtccgcgcgcaacacgccctatcacgggcaggcgcagcaaggttttatcccagcgcaggcgcatcgcaggatttttaagtagccgttgccccagcaccagaagccccagcaaacctaccagccagtaaacgccgctggcctgcaacgcatcgctcatggcaataagcgtgcgggtggagacgggcagcgcgtgtccgagatgatcaaactgttcgatgattttcggtactaccgccgtcagcaaaatagtgaccacgcccgttgccaccaccagcagaaccagcggatagagcatggcctgcaatagacgtgatttcaggcgctgtcgctgttcggtgtaatctgccaggcgattaagcaccacgtcgagatgcccggatttttctccggcagcaaccatcgaacaaaacagagaatcaaagacgcggggatgttcgcgcaggctgtccgacagggtgtaaccttcctgaatccggctgcgcagcgccattccgaggctttttacatgcagtttttcactttgctcactgaccgcctgtaagcaggtttccagcggcattgctgcctgtaccagcgttgccagttggcgcgtgaacagcgcaagatctgccgccgccacgcgacgatgtgcgtgccgccgacgctgcaacatcccccctgacgaagtattcatccgggcttcaatatgcacggggataagctctttaccgcgcaacaactggcgggcatgacgcgcggaatccgcctcaatcatacctttggttttgcgaccattacgctccagcgcctgatagtaaaacagtgccattacgcctccatggttacccgcagaacttcatcgagagaggtttctccggcgagcactttctcaatgccgttgctgcggatacccgcagagtgttgtcggacataacgttccagctccagctccccggcctgacggtggatcaaatcacgcaatgtggcatccaccacgatcagctcatggatggcagtccgtccgcgaaaacctttgtgattacaggcgggacagccctgtggatggtacagagtgacggtacgggcgtcggtaattcccagcaggcgtttttcttcgtcagtggctggtgcgggctggcggcagtcgggacacagcgtgcgaaccagtcgctgcgccatcacgcccgtcagactggaagagagcaggaaaggctccacgcccatatcctgcaaacgtgtgatcgcccccaccgctgtgttggtatgcagcgtggaaaggaccaggtgtccggtaagtgaagcctggacggcgatttctgcggtttcggtatcgcggatttcaccgaccatcaccacatccgggtcctgacgcaaaatcgcgcgcagcccacgggcaaaggtcatgccgacgcgggtgttaacctgcgtctgaccgatcccttcaatcatgtattcgatgggatcttcaaccgtgagaatgttgcgcgaatggttgttcagctcctgcaatccggcgtacagcgtggtgcttttgccggaacccgtcggccccgtcaccagaaagatgccgtgcggtttgtgtaacagctggcgcaactgcgcggtcagttgctggctaagccccagacgctccagcgtcaggcgggcctggtttttgtccagcagtcgcagcaccacgcgctcgccccaggcggatggcatggtggagacacgcacgtcaatcgcccgaccgcccagcagcagcgcaatacggccatcctgcggtacgcgcttttcggcaatatccagccgcgccatcaccttgatacgcgataccagcagcgaggccagtttgcgccccgggcgcagcatttcatgtaatgtgccgtcaacgcgaaaacggatcaccagactcttttcaaacgtctcgatgtggatatccgaagcgccttctttaatcgcctctgccagcatggcgttgatcagtttgatgattggcgcgtcgtcgtcgctttccagcagatcttccgtttccggcagttcttccgcgagagtaaaaaagtcctcagcagaaccgagatcttccatcagctggcgggcctcggaagagtcccgctgccagaccgcattcagccgctgttcaaattcggccccgtcgatttgccgcagcgtaaagggcgcgttcagcccccgctgcagctcctgcaaaacagagagcgacaacggatgaacgtggaggatctccagcgacgcttcgcaccatgccaccaggctaaaccgacggctgaaactgtagggcagacgcacggtgttgacggtggtttcctgtgctacaggcaccattaacgcgttctcccggcattgaggaatgcgcggacttccggcggtaaggcctggttttgcgctggcagtaccggctgtgcggtgtgcggcatcaggcttaagccttgctcatcgcgatagatctgttcggcgcgcatatagttatatttgcgctgcgacacaccgtctgccgccataccgtcacgcagaatggtcgggcggataaacaccatcaggttacgtttttcttttttatccgccgtcgatttaaacaggttaccaatcaatgggatatcgcccagcagcggcactttcgccacgctttctcccgcctggtcgtccatcagaccgccaagcacaatcagctcaccatcgttagccagcacggtggttttcagtttgcgctcgccaaacaccacgtcgaggctggtctgtccttccaccttcgagacttcctgctcaatcaccatctgtaccgcgttaccttcgttaatctgcggcgtgactttcagcatgatgccgacttttttcctttctactgtattgaaaggattactgttattggagccaacggtagagccggttaataccggaacatcctggcctaccatgaagaaggcttcctggttgtccagcgtggtgatgctcggcgtggagagtacgttagaactggagtcgtttttaaccgcctgcaccagcgccatccagtcgcctttcaccacgccaaccgccgtaccgctgaatccagaaagaagctgggcgagtgtggagagatcgccgttggtatccggattaatggtggtagcgccgttttcactgatcaccgtggagcctttctgcggtttcgcctgagaaatggctgcccccagcgtgccaatagggatctgcgtaccgttagcaaactgcattaatccggcatctttcgacgcccactgcacgccgaagttgatattactgccttcggcaacttccacgatcaacgcctcgacatgcacctgagcacggcgaatatccagttgttcaatcacgctttgcagcgactgcatgatgtcctgcggcgcggttacaatcagggcattactgtgtttgctggcggcgatggagacaacctcacgcccgctaccgaccgtgccttccgcctcttctttagccgccgtgagcgtgccgctgacctgcttcagcacatcgaccagatcttcggctttgctgtatttgagatagaaaacctggctgttgccgctgcgttccatttctgagtccagccgacggatcaggcggcgcattttgtcccgcgtggccgggtcaccactgacaatcacactgttggtgcgttcgtcggcgacaatttgagatttcagtgttgctggttggttctcgccgctgtttttagtcaggctttccagcacgcgggcaatttccgaagctgaggcgttatccagcgggatcacctcttcagtgcggtttcccgcatgatccacgcgctggatcacctccgtcagacgctccacgactgaggcgcgtccggtgagcataatcacgttggagggatcgtaattaacaacgttgcctgagcctgcgctgtcgatcatctggcgcaaaatcggcgccagctcgcgtaccgacacattgcgtaccggcactactttggtaaccatttcatcgcccgcgtagttgtcgctgccttcaccgaccagcggcagcggctcgactttcgcggcgctggatttcaccaccttcagcacgtcgttttccatcggtacgacggcatacccctgtgcttccagcaggttaaggaatagctggtaatactgacgttcattgagcggggtcatggtgcgaatactcactttcccctgaacgcccggccccataatgatggtcttattaaggttagcgccgacggtttcgatgaacgatttcaggtcggtatctttaaaattagcggtgaaagtggcttcttccgcccagaccggtgaactgcataatgccgctgccagcaccagcggcagtaaacgcttttttgttttgaggccagttgtcttcttacgccagaccgacaacgtaatatcacgccaaaacacgatgaatgattctcctggattaaatgcggttagcgcagcgcgatggaaatgtcgtggcgcgcacccttgcgtaaaaccgtaagttgaatggaatccattgaaggtaactgccgcatcagagcaatcattgctcgtggatcagtgaaatcctgctgatttagcgcaatggcgatatcgccttccttgaaaccgctggcatcgaacagagaacgatctgcccccggcttcgctgcataaccgacaatcccctccttacgcacaggcgtaagctggatatagttaaaaattttctgcggatctttcgccagtgcctgacgcacggcagccgggatctcaactggcacactgacagcaggctcagcaacagcttgctttgcttcgtcactgacggcttttttgttggtcacagcaacagtggaacgttcctcttcagccagactcagacgctctatttttccctgataacgcagcatcacatggtcgcggttgatttcctcaatcaccgcgttgtgagagccaagcgtttcaccctgcaaatagacctgctgtttaccgccttcttcaataaccgcgccgggtctggcaccaaaggcgatcccacgcagcaccacattaagacgcgtttctgccacaggcacaggttcgggttgttttacctgcgcggcgacaggctgatatttgccaaaccagttttgctggctgattaattgcacgtcatttttatcgaacgtttttgcatccacacggctcggtttattcaccggttgagaaaccgccgtatattccgcagaaaaggagatatagcgccagagtgaatgcgccatttttgcagaaataataagcagcatcagccagaacatcccgcgtgcaatttttcgcagatgctctttgtctgtattaagagattgtctctggttaagagtgtgacgaatttttgtcagccattgaatgagataaattcgtgcgtcacgaaaaacaacccgcgccaatttatatctacccgacgttatgctttgactattccacaggtggtacgatccagtttccgctgatactggttacctgtacgtgtatcattaatcgttatgctgtaattaattccctcagtgatcattaatttcaccgtcgggtcagcgcacatttgtcgttgatagctggttaaaaaggcgtcaggcgtctgcgtggtttgtgtacccgcttcgctgataatggtcatttttaccgttgtgccgctactttgcgccagcactaaggtatatcccgcagatttaatcggcaggttttggctgatattttgcgcctgttttttcgccagtaaactggcattttcattatggctggcacagccacttaataatcctgtaacgctcaacaatagcgatattaataccctccctggcatttgttttatcgacatggtaaataatctctaaggttattaataagagttaaaatgtcactttgataatgacgtggttatcattaaaacaatgcctgtagataaagtgttgctataccgcccagacttaaacacggtccaaaaggcagtgtggttgatcctctttttgtaataacggcatatatcaggccgcagcatgaggcgattaaagcaacattgggcagcgacaatgcccccacccagccacctaacgcggcgaaaagtaatacatcgcccatgcctaatgcttctttacgcagaactattccggctatccaacgcagagagtaaaaagtgataaatcccaccaggacgccggtgactgcatcttgtagcgtgagcggactctgctgcgcccatgccgcaatcagtcctgtccacaatacgccctgagtaaaaacatcgggcagccattggtgatcgaggtcgatgacgctcgcggcaatcagccaggcggataatatcatcaccgccagcccccatccactttctggccagaccagactcgccagcaaaaaagcaagtgctgtcaataactccaccagcggataacgcttgctgattttcgcctgacagtcgcggcagcgccctttgagcatcagccaggagaacagcggaatattgtcacgtatccggatggtctgctgacaatgtgggcagtgcgaacgcggtagcgcaaggcttatttttgactgcgcactcgacatttcaccgtgaaactccgccatttgttggcgcagcatgattgggtaacgccaaatcaccacattcaaaaaactgccgatgatcaatcctccgacggttgccaggacgggcatcgccgtggggtattgctgaaaaacatcaaaaagcatggttaaaggttgtttgttgtaacttgctggatgcggcgtaaaacgccttatccgtcctacgggtgtctgccagcgcaaataatcgcggctttccccgtctgtaggcccgataagcaggcgcatcgggcaaatgtgttaacccggtgcgccttatttcatgccggatgcggcgcgagcgccttatccggcctacgggcttactcggcagacatcttatgctcggtaacctgattaatggtttccggtccctgttccggtttcggcagatcgagtgacgcgagcgtgttgtaagccgactggctcacaccgccctcgaagctcatctcgctcgcccccggcagctggtaagcattcgcgcccggattccatttcttaaagaactccgaaagatccgtctgggcgacccaggaggcacacagcatcagcgtgtccgctgcgttaccgttggattcagcacagtaattcttgccgccaaacttgtcattgctgacctcatcgccgcgtgctttacgatgcatcaactggaacaggttccagcctttcatcccttcacgctcgctgtaaaactctggcagaggagtgccatctggataccatttcttgatatcaaagtttttctctgcccattccttcagctgtgcgtacatcagcagacggtcacccgcaccgccgcgtgcccatgcctggttgttgctctcctccagatattccggtgcgacggtaatatcgtcagcgacacggttcatcttgccgagataacgatcctgcatgtacagcgccagcacgttgttagcgacttcagttgcacccggtacagtcaacggcgtttctgcggcgttatgaccgacttcatgccagatcagccagtcgttcagcggcgtcgtcggcagcgtggtgctgttcggcgagaagctgctgttcattaccggataacccgaatgcgcatcaccgatggagatctgcacatcgttggtgaaacgatgtttgtggcccggcaagtttttataggtaaacatccggtgcttaccgtcttcgctatcacggccgtagaagtcattcatcgagctggcaaaggtatccagatcgttagcgaattgctccagtccgccagtgtaattgctggcattcaggttcttcttcggtgtggtatagacgaaagcgtctgattccagctcacccagcggagccggtgagttcagatcgtttttccatgcgccgtctttatagaacggtgcttttaccacgccagtaaaggtgaagctggcagattcattggtagagctattgcccttgatataaatcaggccaccgtaaggcaccttgaacttcaccgtaccgctagcgtccagagagtacgttttagtcactcttggcggacggttcagcgcaacttcatgcttctcacgtccggtcaggtcgtcagccagcgccacggtgacggtcacaggaacgttcgcattggacttaatggtgacctctttctgagccggtgcccacaggccagttgactgcatgttacctgcaaaccatttggtcggattcgagtacaggctgatggtttcagtaacgttctgtccctcttccgatactgctcccggatacttctcgacatcaactttgatgttcagatcccaccaggaacggcccagcatcaggcgtgtcagcggtttttccatatagttgagcgggtagctcgggttcatcatgcccgctttgctgctaccgtcaccgtagatcatgttgttatcgaccagcgattttttcagatctgcagaacacttggtgccgcctgcataggcatcattggcgtagcagttcaggaactcggtgaacgttttaaagcccagctcgtcatttttgccttcttcataacgatagctcgtatcgttccacagccagaccgacatgttctggtacagacgttccagatcgacgctgctcagacgctcacctttgcgaccattggtccggaagtagagctcatgctgatacagacgctgaatgttggtgcctaaatccgcagcctgcaccatcgcttttgcagtgtcggcgttaaggcttagttgcgtatactgtggaacatacatgccaccagtaaccggaacccccgtgccaggacgatattccaggcagttgacctcatagtgatatgccggattagtacactctttcagccccgggaacgcggcgaaaattttctccttcgcagccttcagagaatcctctgttttatgatcggcctcatcaataaaggcataacgcgtttcctgtttgccatctacatcttccagccagctggcaacttccagcttcggtttgtcatcaggtttgttttctacctgatatttccacttaacttcccctgtcttactatcgatggtgtacggcagcgcaccatctacggcaggataacgttcatagacccaaatgcccgttgcgcgctgctgacgaacgcggttcggatacccttgcggatcgttatttactaccgacttgttcagtgccatcgacagacctgcggcatccaacagacgcacaaaaccagacgcgctctcttccttaagattgctcatcacgttttccatgatcagcaccgatccacctttgttcagataggcgatcagatcggtcacatcctgctgagtcagcttcggtttgctggtatctgcacgcagcgggattgcataaggatcgttacccacctgagtcacatattcaaagccgttaaggatcagcagcggcatttcctgcggatcgagatcgccatagctacttaaatgctcaacagagatgcccgcaaaatccggatggaagtcgaacgcagcgctgtttcctgtaacctgaccatgacgtttaaaatagacagtatccaggttggtgcctacggtcatgctggctttcgcgtccggcttccatttatcgtcggacagatagcgcagcacgttctccatgaagttcttcatgtcatccgggtcgctgttgagcgtacactgcccatctttattaacgcccccgttccagctgtaaccgttcgggcaacgcaaaatgctgttgtagtgtgggttaccgataaccatcagtttgccctcaccgacttgccccagcgaaataaacggcaggttaaaggtggcggtatcgcgcgtaacgttttccggctcaacaagagaaggcgcttccgtaatgtacgccagctcgtttttatcccaggcgcgtttttcgccgaaggccagccagtagtttttatcattacgcgccatcagaatcgggaaggccgcgttggagatattcaccaccgcctgaccgcgcgcattacccgtgctgccatagaagttggtggagtcatggaatacatggaacttgctgacagatttgtagttcgtatccacgccccacagcttgttgataacgccctgaatctggccgtcattaacattgcgcgtcgtcagcgagaaccagcgagcctcgttacaaccatcggttttcgcacaaatcgcggtatcgatctctttggcctgacccgtattaaactgctcaataaattcgttaggcagattaacgacttgctcaccttcccccagcgtcgcaccgttggataacgagagattgataatctcgttgatcacgttgggatattcggcaaagaccttgcgtacatcgtccggaacaacacgggtattattttgcccggtcgtcgaatagcgatgaataagctgatcaatattcgccccgcgaacttcatcacccagttcagtcagcgcaatggtcgacttattgccgcgcactgaacccagttcaaaggtatcgataccaaaggagatggtttcgccccagctaaaggaaaattcaccattttcccctgtcacgccacggcctgaattggtgtagtagttgacgccagcaacaccatatccctggctatcgaccagtcgaccttcagagagaatgatttcagtgggttgatactgataaaactgttccgcgttagccgacacgaaggaagcgttcagatccggttttgttcccggcgtggtgacgggcacgaccggtgaagtatgagtggatggcgctttatcggtcgcagcattgttttccacctcttcattgaccagctttttgaactcttccggtgccagatcgatttgcttatacagcgagtcgaagcgtttactctcgatcaccgaggagaacgtcagacaaacctgttctgtattcgccggacagctgttactggacgttaccagcgaaaccgcattgcttttcttgtcatcggagcccgccagttcttgcgcgtcctcaaggctaaacgacactttttcaaccgcacgcaagctacgcgcagcttctgactgagtgttgaaggtggcaattgtcgtgttacccgccacgcaagtaacgtcctcgccaggtttaaatgtaaagccatcgctggattcaccattacaggtagcaccagttacccgctggcttccgcccagggtcagataacccgttttcgtaggaacaggttctggctccggttctggtgttggttcaggatcaggtatcggttctggcgtaggctctgggtccggcgttggctcaggcgtcggctccgggtttggtgttggatcaggtttcacttccggcaaagaccctgttccagaatctacaggcggcgtatcggaggaagatccggaaccaccgccatcacaaccggctaacagggttgcgctcaaaatagccgctaaaagcgatttcttatatttaaatttcttattcattaataacgcaagtgacaaaacaatgttaaaaaattcgtaactgggagaaatagttttatgctttatcttctctaataacttcctccattcttaagaaaacgacatcattgatagaaaacaggtgaaatttataagaataacccctatacgatgtctatctggctatttttacgaaatttcaacaaacaaaaaattaacaacatttcacaacgtaactatataaatttgttggtagttttaacgattaagattgcaaaagcaacagatagaacggtgtttgctcatcaagcgaacataattaatacagacttgttttgcgtgataaaaaaatagatgttctcacgctcttaattatttagcaggttatctgaacgcaaaacattattgctgcatggataataaagcgagaaatgattttcaattaataagacagaataatgtaaatgaagccggatgatattaacgatcatccggctttattgatttacgagactaacatcccggtaaacacatacgcctgcagcagggtgataatgccgataacgctggcaaaaatcagactgtgcttcacggtgtagcggaacagttcagattctcggcccaccatgcccgtcgcggcgcaggccacggcgatagattgcggggagatcatcttgccagttacaccgccgctggtgtttgctgccaccagcagggtgtcagagacgttgatttgctgcgccgtggtcgattgcagtgaaccaaacagggcgttagaggaggtgtccgagccggtaaggaatacgcccagccagccgagaaacggtgagaagaacgggaacatcacgcctgtacctgccagtaccagcgccagcgtggtggacatgccagaatagttggtgacgaaggcgaacgccagcaccatgccaatcgacagtatcggccacttcaagctaattagcgtttcggcaaagacgccaatacctttcttgatccccacaccgaggatgaagatagagataatcgccgcaataaaaatagcggtgccgccagccgagagggggtcgaatttaaacaccgcatccattggcgttggttgggcgacaatgggtgccgctttcaacacttgttgatgcaaatgagggatctggaaattaatcaccagtgaataaaacgcgccgcccggagcaaataacgctttaaacggcttcatggtccagatggtgaccagcaccgttaagattaaaaacggtgaccacgctcgaatgatttgccccagactatattctgaaggcacgggaccgccagaagatggcttatttaccaccatcgcacctgcggattgtcccatgctgattgccgtttcggtatttttcggccgccagactttaaggaataaagcgagtgagacgatactcaccagcgccgaagtaatatccggcagttccggaccaatatagttagaggtaaagaactgagtgacagcgaagcttcccccagcaaccagcgccgctggccacgtctctttcacccctttccagccgtccatcattgctaccagccagaacggcacaagaaccgacaggaacggtaactgacgtcccgccattgcgccaatgtggaacggatcgattcccgttacctgaccggcgaccagaatcggcacgcccaacgcaccaaacgccaccggcgcagtattggcaatcagacacagccccgccgcgtataacggtttgaagcccaggcccaccagcagcgcaccggtaatcgccaccggcgcaccaaagccagccgctccttccagcaacgcaccaaaggagaaaccaatcagtaacacctgcaaacgctgatcgtcggtgatggagataaccgagctgcggataatatcgaactgcccgctggcaacggttaatttatacaggaacaccgccgcgacaataatccacgctattggccataatccataaataaagccatagcccgcagcagcaaatgccatatcaatcggcattttaaaggcgaatattgcaatcaggatagataatataagggttattgctccagcgacatgtcctttcagacgtaataccgcgagtgcaacgaagaagaatattatcgggatcagggcgaccagagcggatagccccagtcctcccatcggcatatacatttgggtccaggtaaccatattgttcagtctcttattatctttatatgcttgatatacttaaggttgtaataagcaaaagaggactgaactgtaaaatataggcgttatactttacagcaacagtacgccgctaacgcaattgctacctctggcataacaagtatatcgggtaagggtttctgttccgcacacgcagacgcagagtatcgttaagatgtccatattgttgttttaggcccgctagtaatgcgctacgggtatttaatattgttaaaccctgataatcgctccggttatttccgggataaatgtactaccgcagttactatcatagccccgacaataaaacttgccggggcttttttgacgctattaatgactttctttttcgcgtaaacgccaggcgtgtaataacggttcggtatagccgtttggctgtttcacgccgaggaagattaaatcgctggcagctttaaaagcacacgagttagcgaaattccccgccatcggacgataagccggatcgccagcgttttgctgatcaaccactttcgccatattctccagcgacgcctgcacctgttctttggtcagaataccgtgacgtaaccagttggcgatatgctggctggagatacgcagcgttgcgcggtcttccatcaacgccacattgtgaatatccggcacttttgaacaaccaatcccctgctccacccagcgcaccacgtaccccagaatcccctgcacgttgttatccagctcttgttggatctcttgcgccgaccagttagcgttttcagcaaccggaatagtcagcagatcgtccagcagcggttcaaattcagcattgaattcggtctgggcaatgttggcttgtacgctctgtacgttggtttggtggtagtgcagcgcatggagcgtagcagcggttggtgacggaacccaggctgtgtttgccccggcacgcagttggtcgcccttctggctgtacatgtctgccatcaggtccggcattgcccacatgcctttaccaatttgcgctttaccgcgcagcccacagaacagaccggaaagcacgttattacgctcgtaggctttgatccaaggcgtcgatttcatctgatttttacgcagcatcgggccagcttccatcaccgaatgcatttcatcgccggtacggtcgaggaaaccggtattgatgaacgccacgcggttgcgcgcctgagcgatacagctacgcaagttcagcgaggtccgacgttcttcatccataatgcccattttcagggtattcggtgccataccgagcattgtctcaatgcgggtaaacagtttgttggcgaacgccacttcctgcggaccgtgcattttcggtttcacaatatagacgctgccagtgcgcgagtttttctgcacttttaaatcatagagggcaatcgcgccagtcatgacgccatcaagaatgccttccgggatttcattgccttcgctgtcccaaatcacaggaatggtcatcaaatgacccacgttgcggataaacagcagcgagcgtccgtgcagagaaatttcagagccatcggcggcggtgtaatgacgatcgtcattcagtttacgcacgatttgccgaccgtttttctccattttctcttgcagagtcccctgcatcaggcccagcaggttgcggtacagcaggattttatcttccgcatcaaccgccgcgaccgaatcttcgcagtcgagaatggtactgatagcagcttcgacgataacatcgttgatgtgcgccggatcgtctttgccaatccgcccattggcatcgatttgcagctcaatatgcaggccgttatttttcagcaaaatgcaggtcggcgcagcggcatcgccacggtaaccgacaaactgtgctggagtacgtaacgtggtttctttaccatttttcaactggatgcgtaattgtttatcaaccaccttaaacgccaccacatcctgatagctgccgttttccagcggtagagattcatcgaggaaacgccgaacccaggcgataacctgctcaccgcgttgcggatcgtagccgctgaccatcgccccttcctgcgggatgatgtcgctgccgtataacgcatcgtacagtgagccccagcgagcgttcgccgcgttcagcgcgtagcgggcgttcattgccggaaccaccagctgcggccccgcctggctggtgatttcgctgtcaatgcccgtggtttccaccgtcacgcgctccggttgcggcaccaggtagcccagttcacgcaggaaagatttataggccgctttatcttttaccggccccggattgctgcgatgccactcatcaagcgctgcctgaatgcgatcgcgttctgccagcaactgacgattttctggtgccagatcatgaacgatctcatcaaaattgcgccagaacgccgcagcgtccagccctgttcccggtaaaacttcttcatccacaaaacgtttaaaattggcgtcaatgcgtaaacggctctgggttatggtttgactcattgtttatctcctcgttttcgcttatttcgccaacaccgctgctgccgctttcgcgacctgcgcatcctgtgctccggttaaaccagaaacgcccacggcaccaataatttgcccatccacaacaaccggtacgccgccttccagcgacgttaataacggcgcagtcacgaacgcggtacgtccgttgttcaccatctcttcatagcccttagtttcacgacgccccagcgcggcggtacgcgctttctcctgggagatataagccgcaatcggcgcgcaatcgtccatgcgacttaacgccagcagatgaccgccgtcatcggcaacagcaatggaaacagaccagttatttttctgcgcctcttcctgacctgcggcaataattgcactcgccatttgctggctaagaatgactttagttttcattttgttattccttttcaagggcttgttctacaatttcaatccagtgacgcacagaggtacgaccggcgctcgccagatgcgtctggcaaccaatgttggcggtgacgatcatttccggtttgccgctttccagcgcattcattttgttatcccgcagctggcgtgccagatcgggatgcgttaacgcatatgttcccgctgaaccgcagcacagatggctgtcgggaacgtccgttaaggtaaatccaagacgaagcaacactttttccacttcgccgttcagcttttgcgcatgttgtagggtacacggacagtggaaggccagctttttatcgccgcgaattgccagtttttccagcggttcctcgcgcagaagttcgactaaatcgaccgccagttcactgacctgacgcgctttatcggcatataacgcatcgtttttcagcatctgcccatactctttgacaaacgcgccgcagccgctggcggtttgcaaaattgcctcggcacctgcttcaatcgcgggccaccaggcatcaatattattgcgcgcccgtgccagccctttctcctgcgcattaagatgatagtccaccgcgccacaacagcctgcttcgttagctggcatgacgctgatccccagacgatccagcactcgcgcagttgccgcgttggtgttgggcgaaagcgtaggctgggcgcagccttccaacattaaaacccgacgcttatggcgcagcggcggacgcggtttagctttcaccgtttcagcaggcagttttgctctgacctgttccggtaaaaacggtcgcagcaccagccctacctgcgtcagcgcacggaagaccgccggacgcggcactacctggcgcaatccttcgcgcagtattcgctccggcagtgggcgtttcactttctgctcgacaatatcacgcccgatatccagcaaattgtgatagcgcacaccagaaggacaggtggtttcacaattacggcaagtgaggcagcgatcgagatgctcctgtgttttaagcgtgacttcgttgccttccagcacctgtttaatcagatagatgcgcccgcgcggcccgtccagttcatcgcccagaagctgataggttgggcaggttgcggtacaaaatccgcagtgaacacaggcgcgcaggatgctgtcggcttccagcgcgcgcgcgttctgccgcatctcttcagttaattgggtttgcatagcctgctcctcaaagttccgcgtacatgcgaccggggttaaacacgccgcaagggtcgagctgctgtttaagctgctggtgatagcggaataaaggagccgatagcggggcaaagccaccatctccggcactaaagcgggtcgcatgaccgccagcgttgcgggcgatgcgatggatttgattgtcctcggctgtcgatttcagccagcgtaacgccccgccccagtcgatcagttgctcgccgggtaaatccatcatcggcgcatcactgggtaatgaaatgcgccataaggtacctggtaacgagaagaacggcagttgttgttcacgcaattgctgccagaactgaccggcaacctcttcgccacccagcagttcacgcgctgcttttaccgatccttcgccgccctcaaggcggatccacaacgcattgtcgaagtaacataagccactaatgggtaatggctggagttgccactcggcgatttcactcatggcttcttgcaggctgatttcccgacgcaggctcagggaggcgcgcggtcgcggtaacactttcattgagatttcagtgagcacgccaagacaaccgtagcttccgaccattaaccgtgagagatcgtatccggcaacgtttttcatcacttcgccaccaaaacgcagatgttttccagcgccggtaatgatgcgcgtgccgaggacaaaatcgcggaccgaaccgctccacgggcgacgcggccccgccagcccgcaggcgaccatcccgccccaggtggcttcttcaccataatgcggcggctcacaggggagcatttgccccgcgctttccagcgccgcttcaattgtcaccagcggcgttccgacacgcgcggttatcaccagctcggtcgggtcgtaattaacaatgccgcgatgacaacgaacatccagcgtttgcccggtgacagggcgacctaaaaaggctttgctattgctgccctgaatcaccagcggcgttttatcgctaatcgcctgattcacctgctccagcagcgcctggctgtaatcacactcgcgtagcatcagaaacgctccagttcagggaaaggtaaatgaccgtgatgcacatgcatggcaccaaattcagcacagcggtgtagcgtgggaatgtttttcccagggttcagcaaaccatcggggtcaaacgccgccttgaccgcatggaaggtcgtgatttcatcgctgttgaactgggcgcacatttgattgattttttctcgcccgatgccatgttcgccactgatgctgccgccaacttcaacgcagagttcgaggatcttcccgcccagctcttccgcgcgggcaaattcaccgggttcgttggcatcgaaaaggattaacgggtgcatgttgccatctccggcatgaaagacgttggcaacacgtaaatcatattgctgcgataaacgggcaatgccttccagtacgccaggcagggcgcgacgcgggatggtgccatccatgcagtagtaatccggggagatacgtcctaccgccgggaacgcatttttgcgaccggcccagaaacgtacgcgctctgcttcgtcctgtgccagacggacgtcagtcgcgcccgctttcaacaagatgtcgttaacccgctcgcagtcttcctgtacgtcagactccacgccgtccagctcgcataacaaaatcgcttcggcgtcgacgggataaccggcatgaataaaatcttccgccgcgcggatcgacaggttatccatcatctccagcccgccggggataatgccattggcgatgatgtcaccaaccgcaagtccggctttttctaccgagtcaaagctggctaacagaacccgcgccacgggcggcttcggcagcagttttaccgtcacttcggtggtcacgccgagcataccttccgatccggtgaacagcgccagcaggtcaaaaccaggtgaatccagcgcgtccgatccaagcgtcagtgcctcgccgtccagcgtttgcacttcaattttcagcaggttatgtacggtcagaccatatttcaggcagtggacgccgccggcattttcagccacattgccgccaatggaacaggcgatttgtgaggaagggtccggtgcgtagtagagattatgcggtgcaacggcctgggagatcgccaggttacgcacgcctggctgcacgcgcgcgcggcgaccaacggggttaatgtcgaggatctctttaaagcgcgccatcaccaacaacacacctttttccagcggcagcgcgccaccagaaagcccggtgcctgcaccacgggtcaccaccggtacacgcaggcgatggcagacagccagaatcgctgtcacctgttccatttgcttaggcagaacaaccagtaatggacgcgtgcgatacgcgctcaacccgtcacactcgtaaggaatgatctcctcatcggtatgcaggatctcaagtccagggacatgctcacgcagtgccatcagtaccgatgtgcggtcgacatcgggtaaagcgccatcaagacgctcttcgtacaagatgctcatgagtaggcttcgctttgttgtgttgtgtggcagctgatttttgcgcgctgcttctgtgaacagttattaagcgggcttttcgttttcgtctatctctttagctaccggtcagaccattttttttccagctctgtgaccttgtcttggttaactcaatgttaaattgatgtaacataatcacttacgtgatgtgcgtgttttgcgagttaagaacagaaaaattggtcctacctgtgcacgaggtccgggaatgaaagatgaacgtcgccctatttgcgaagtggttgcagagagtatcgaacggttaattatcgacggcgtactgaaggtcggtcagccgcttccctcggaacgtcgactgtgtgaaaagctcggcttctcacgctccgcactgcgtgaagggctgaccgtgctgcgcgggcgcgggattattgaaacggcgcagggtcgcgattctcgtgtcgcacggcttaatcgggtgcaggacaccagcccgctgatccatctgttcagtacgcagccgcgaacgctgtacgatctgctcgacgttcgcgcattactggagggcgaatcggcaaggctggcggcaacgctgggaacgcaggctgattttgttgtgataacccgctgttatgaaaaaatgctcgccgccagtgagaacaacaaagagatttcgctgatcgaacatgcgcagttggatcacgctttccatctcgccatttgtcaggcttctcacaatcaggtgctggtgtttacgctgcaatcattgaccgatctgatgtttaattcagtgtttgccagcgtaaataatctctaccatcgaccacagcaaaaaaagcagatcgatcgccagcatgcgcggatctacaacgcggtgttgcagcggctgccgcacgtcgcccagcgcgcagcacgcgatcatgtgcggaccgtgaaaaagaatctccacgatatcgagctggaaggccaccatttgattcgctcggcggtgccgctggagatgaacctgagttagctggtattaaatctgcttttcatacaatcggtaacgcttgtacggctccgccccaatgcgttccagcatgttattcatgcctgtattggtttcgaggatccatgacatctccagcgcatcgatcttccggcgggcaaacggatcgcgtaaggcttcaatcaataacagcgcaatcaccgggccgatgcggctgaactgatactcgtcgcgcacgcccatcagcggtactcgcgcagttcgcacaccgctgactttcaaacgccacagcaattttgcccagccgaagggaaagagcgatccgttcagatcggcaatcgcctcgttgatgttcggcaagccgacaataaacgcgcagggtgcagaatcaatctcagcgatatagatcatatcgtccggcaccagatatttaagttgatcgcccatggtcgcgaattcatgttcggtaaacggcacaaatccccagttgtgctgccagccagagttgaaaatctcacgcaggatctgcatctcttcggcaaaccgctgacgattgatgcagcgaatggtcacctttttgcgcacctgatccatcagtttttttagcgccggagagaaagtgagatcggttcgctgcatccaccacgccagtaaatcaatgcctttgtgataacccagttgttcaatatgcgcggcataccacggtttgccgtgtggcatcatcgcacagggtggtgtgtcaaaaccttcaatcagtaatccgctttcctgattgatattcaggctgaaaggaccgctgatcttacttgcaccttgtgacttcaaccacgcttccgctgcgccaaacaacgcggcaaaaacctgcggatcatcaatggcgtcaatcatgccgaaatgaccggtatctttgccgtaacgctcgcggtgcaaggtatctatttgcgcggtaatacgcccaactatctgccccgctttttttgccacccacgcctgccagatgatatggtccgtccccggatttttcgcagacaaatgctcgttgcgttcaatgaataaagggggtatccagtttggatcgtcgggataaagtgatgacggaaaagcgataaatgccttaaggtcatttttattaattactttttcaattttaatcatcagcagatcgcattccatagttctgttctgtgggtaacaaataattaacggtgacaaacaggttgcaacagcaacgaacggcaccttaataatcaacccaatgaatacaaacgacgaataaatagtatttattaatgattacgataaggtcagagactacacagaagcgccacaatgccttttgtcgatttaaggcgaccggacaaggcttcttcttaatatattcataaattaaatatcattcacaataaaaacaaaaaaactcaaactcattatttaaatcaatgttcattttcacactgatgaaaatactatctcatttatcttttatgcctatataatccaccgcattattgtcattttattttggatatccaattttttcgtggtgtatatgtctaataaaatctttacgcattccctacctatgcgctatgccgattttccaacgcttgttgatgctttggactacgccgctctgagtagcgccggaatgaatttttatgacagacgttgccaacttgaagatcaactggaatatcagacgttaaaagcacgtgccgaagctggtgcgaagcggttgttatcgctgaacctgaaaaaaggcgatcgcgtggcactgattgccgaaacaagtagcgagttcgtagaggctttttttgcctgccagtatgccggcttagtcgccgtcccgttggcgattccaatgggcgttggtcagcgggattcctggagcgccaaattgcagggtttactggcaagttgccagcccgcagccattatcactggtgatgagtggttgccactggtcaatgccgcgacgcatgacaaccccgaattacatgttttaagccacgcctggtttaaggcattaccggaagccgatgttgcgctccagcgtccagttccgaacgatatcgcctacctccagtacacctccggcagcacccgttttccccgtggcgtcattatcacccatcgcgaagtgatggctaatctacgtgctataagccacgacggcattaaattacgccctggcgaccgctgcgtctcctggctgcctttctaccatgatatgggactggtcggctttctcctgacccccgtcgccacgcagctttcagtagattatttgcgcactcaggattttgccatgcgtcctctgcaatggcttaaattgatcagtaaaaatcgcggcaccgtttccgttgcgccgccgtttggctatgaattgtgccagcgccgcgtgaatgaaaaagatctcgctgaactggatctttcctgctggcgcgtcgctggtattggtgcagaacccatctccgcagaacaactccatcaattcgctgaatgtttccgtcaggttaactttgacaataaaactttcatgccgtgctacggactggcagaaaatgcgctggctgtcagcttctctgatgaagcctccggggttgtggttaacgaagtggatcgcgacatcctcgaatatcagggtaaagccgtcgcgccgggtgcagagacacgcgccgtatcgactttcgtcaactgcggcaaagcgttgccggaacatggtattgaaatccgcaatgaagcaggtatgccggtcgcggaacgtgtggtaggccatatttgcatctccggtcccagtctgatgagcggttactttggcgaccaggtttcgcaagacgagattgccgcgacgggctggttagacaccggcgacctcggttatctgctggacggttatctgtatgtcaccggacgcattaaagatctgattattattcgtggccgtaatatctggccgcaggatattgaatatatagcggaacaggaaccggaaattcattctggcgatgcgattgcttttgttaccgcccaggaaaaaatcattttgcagatccagtgtcggatcagcgacgaagaacgtcgcgggcagcttatccacgcgctggcggcacggatccaaagcgaatttggcgtgaccgcggctatcgatctgttgccgccccacagtattccccgaacgtcctccggcaagcctgcccgtgcggaagcgaaaaaacgttatcagaaggcttatgctgccagtcttaatgtgcaggaatccctggcatgaatcaaactgtcgcggtgacgggcgctaccgggtttatcggtaaatatattatcgataacctgctcgcccgcggctttcacgttcgcgcattgacgcgtactgcccgcgctcacgtcaatgataatctcacctgggtgcgcggttcgctggaagatactcattcacttagcgagctggttgccggagccagcgtagtggtccattgcgccgggcaagtgcgcgggcacaaagaagagattttcacccgctgtaacgttgacggcagcctgcgcctgatgcaagcagcaaaagagagcggcttttgccaacgttttctgtttatctcttcgctggcggcgcgccatcccgagctctcctggtatgcaaaatccaaatacgtcgccgagcaacgactggcagcaatggcggacgaaattacgctgggcgtttttcgcccgacagccgtgtatggtcccggcgataaagagttaaaaccgctgtttgactggatgctgcgcggcctgctgccacgacttggtgcgccagatacacagctctcttttctgcacgtcaccgatttcgcgcaagcagtgggtcagtggttaagcgccgaaactatacagacgcaaacctatgaattatgcgatggcgtcgccggcggctatgactggcaacgcgtacagcaacttgccgccgacgcccgttgcggttccgtgcgaatggttggcattcctctgccggtactcaccggccttgcggatatcagtaccgcgttgagtcgcctggcaggtaaagaacctatgctgacccgctcgaaaattcgtgaattaacccacgccgactggtcggcaagtaataaccgtatttctgaagatattaattggtttcccgggattagcctggaacacgcattacgcaacgggctattttgattgtcttgtttaaaggtgtgttaacgtttctatggtaaatcgtgaaatagtaatggattacatcctttcctgtttacaggatttggtcgaaaacggtgtggaaattaagcccgacagcgatctcgtcaacgatcttggcctggagtcgatcaaagtgatggatctcttaatgatgctggaagacagattcgatatttccattcctattaatattctgctggatgtcaaaacccctgcgcaattaatggaaactctacttccatggctggagaataaataatggggctatacgataaatatgcgcgccttgctggcgagcgactgcaatttagtgacaacgggttaacaccgtttggcacctgtattgatgaagtgtattccgccaccgaaggccggatcggcaataaaaaagtgattctggccgggaccaataattatctcggtttaacctttaatcatgatgccatcagcgaaggtcaggccgcgttagcggcccaaggtaccggcaccaccggttctcgtatggcaaacggcagttatgcgccgcacctggcgttagagaaagagattgccgagtttttcaatcgccctaccgctatcgttttttcaaccggttataccgctaatttaggcgtcatcagcgcacttgccgaccataacgccgtggtgttactggatgccgacagccacgccagtatttatgacgcctgttctctcggtggcgcggaaattattcgtttccgccataacgatgctaaagatctggaacggcgcatggttcgcctcggtgaacgggcgaaagaggcgattatcatcgttgagggtatctacagcatgctcggtgacgttgcgccgttagcggaaattgttgatatcaaacgtcgtctcggtggttatttgattgtcgatgaagcgcattcgtttggcgtgttaggcgcaacggggcgcggactggctgaagctgtcggcgttgaagatgatgtggatattatcgttggcaccttcagtaaaagtctggcctcgattggcggttttgctgtcggttcggaagcgatggaagtgctgcgctacggcagccgcccgtatatttttaccgcctctccttctccgtcctgcattgcgaccgtgcgctcgtcgttaagaactattgccacacaaccagagctgcggcaaaagctgatggataatgccaaccatctgtatgacggtctgcaaaaactgggttatgagttaagttcacatattagcccggtagtgccggtaataatcggttcgaaagaggacggtttacgcatctggcgcgagcttatttcgctgggcgtttatgtgaatcttatcctgccacctgccgcgcctgcaggcatcacgctgctgcgctgtagcgtaaacgctgctcacagtcgtgagcaaatcgatgccatcattcaggcatttgctactctgaagcagtaatgtgagcccgccgtggtgttgcgccacggcgggtttaatgttgtctgtcataccaatacaccaggctcaacgccaccagcacaaacgctatcggtaaaccgagcgcggtaacaggtgcgctcaacgcaaatagcaatcccagattgaccatgatttgatagctgatccaggtgagtaagccaacgatgacacctacagcgatacggctacccatccctggcgagcgcggggcgctaaaggtaaacggcacagccagcaaaatcatcgccagggtcaggatgggttgccccagtttttcccacagtgcaaggcggtattcgctgctgggttgcccggtttcctgcaaataatggatgtaatgattaagctgacggacagaaaaagtattgcccggcattgataactcttcaagatccatactggtgaaggccgattgccaggcaagattatctaatgtttccagcgtttctttgccattcagccattttttatgattcacaccatgcaggatccacgttttgtcgtcttcaatggtggcactgcgtgcataaatgtaggattcgagcgagagatcgtcgcgataatgaaaaatctccacgcccaccggctggccctgctcgttcagcgatttcaccgtcacaaattcattaccacgcctggcccacagcatattgccggtaatgtcatcgtcctcccccaacgcggtggcggtcgatttgatttgcaacgcctgttgctgtaatggcgacgctacccactcatctatcgcgcctaacgaaacagtccacaatatccctgcaaccagcgccaccagtgcaatacggaagatagaaaaccccatgctgcgaatggcggtaagctcactgtttttcgataactgccccaggccgacaatccctcccaataaggcgataaatggcgaaagttcgaccagtgtgcgcggtaaggtcattagcaccaccagcaccgcctgagtccagcgataaccgcccgggctgacatcatccagttcgttaatcaggttgaaggtggtaaaaagcggcagcaatagccctgcggcggcggcaaaaccgagaaagagatgacggattaaatagcggctgaaaacattcatcgggaaaatttctgcagcaaagagaagtcgcgtgcgaccagcatcagcaggcccattagcatgagtccgggtactaaccacaaaccaggaatgaggggaatcgcgccgttagccaccagcgtacggcagacgtcaccgccataaaaaatggcaataaacagcaacgtcagtggcaataacgttgaaaatcgcccttgccgcggttttacccgacttaatgaaatggccagcagcgccatcaacaatgcggtcaggccacggctttgccgccattgcagttcggcatgatcggctggaaagacggagcgcgccagctccgtgaccgatttcgctttgcgtttgacgttagggctttgatccagcggattcagatgtaattgcagattacggtagatctgttcgttgtcatcacgcccctgatgatcgataagataggcagtgccgttgtgcaacataacggtcggtttctcgggtgatgggtcaaccacatcaaccgaacgggcgcggaaaatgcgggttcgattggcagtagaagtataaatcagcgcgtcagtcaggcgattattatcctgatcaaccgtctgcgaaaggatcattcgtccgttatcgttagtgttaaatttctttgcccgcaactggcgaacatccagctccgactgcgactgctgctccagttgataaatctgcgcataagcccacggacgaccatacatcgacagaagggtgacaaaaatacttagcggtatcgccagataaagaacggctttgtacaagcgtcccggactgccccccgccgcagagatagcggtaatttccgagtcggtatacatctgccctagcgtcacgccaactgacacatacagaccaacaggtaacaacatctccagtgcaatcagtactttgtagaaaacgatatccagcacaacatcaagagctaatgtcccatttgccgcttcggtcagataacgctgtgcggagtagctggcgaaaataaagatcagaaaaccgacgataatcagcaccagacggcgcgtaccacgcatgatgtagtgttcaaccagcttcatctcactaacgccctcaatcctttgagttttttattcattgatcagtttctgcgccaacgcaatgacatgatctacctcttccggcgtcaggctgccgtcctttgcccactgaatttgcccggctttattcagcaccagaatggttgaactctgctccggcaagcgccaggcaacgcgtccctgtccattgccgtcaataacgaattgcgcccacggatagcggcgtttatttttttcgattttgccaacaacaaaatagccagtaccaaagatggcatcatcggtgttcacaatggtggtgggctgaaaacgatcctgcggaaagtttgccgcttcaaccgctttaattaacagtgagttctttttcttcgccgacttacgcccggcgatatactgaataatgcggacttttcccgctaattgtgtgctgttccacttttggtagtgaatttcgtcgtcgctattcagaagcagctcgccgccttcctggatataaacaggggtaaccgttttgccagtgacgaaattgtgtgcctgcacacccggggctaagagcatgataatcaacgcaataatcaaacgagatgacatcattgctccggctatagcggaaaacgcgaaatcagcagctctaagcgctgacgaatatcgctatccagcgccaccggtgcatcatacgactggcggttttccatatcatccgccaccatgtcgtcgtgtttatctcccatcaggccattaatggcggcgaggaagcgggatatctgtaacgcctctttattttcaggatcaagcgatcttaaggtgtcgtaataagaaacctgctggctgatgatttttcgcacatcatgaaattccctaccggttagtcgcggtttggcaataatctctttcagggtatgcatttgcttttgccgataggcaataaaactgcttacgctttctaactggctatggcgtaatgaatagttcaccaacgaccagaccggagagcttaaataaatccgtaacaggttgccgtaatacgacacaatatttttcttaccgttacgaaagccgtcctgaaaacgccccagaaaaacggtcgttttgccgaataaaaatccggcctgatgcttctttaaatacagccgttgcgcaaaacgcaggtgcttgtagcgcgctcgcatgtatttaaattgtttgcgctcatcagcagtcagctcatcgcctttggcttgtttgcgaactaaacgcagtaactcctgacgatcaacgccattgagccagaattgcaggcataacgcgtaattatcatgaatgatttcggtggtacaacttagtgcaatagtcggcggcaaactaacctgtgcatcaacgacatcatcttcttcaatcgcaacaaatagacgctcgctcgcctcaagcgggaaatattttctcatcatcaggatttctctccggctgcgttataaagcaaggaatggcgctgaaaaaatgcctttaaggttggaattaacgagagcgccacgtccagacattgcccaccgaagtaagcaaacgctgctcccagcacaccaaacagatgacagaacatgaacagcaatacgatgtagccgattgaggcgatggtttgcgccacgagaaaagcgcgctgttttcccgccatcaatagcaatgactcctgagggaagcccagcatcgaaatcacaattgcgcccagcatcacctgaatcaggtcatacgcttcgagatacttaacgccaaacaccagcgaaatgagcggcttgccgacgatcaacaccgcgagcgccaccagaataccgattccgcccgccagtaaaccggacttcacacctaacaaccacggtctggtggtgcgcggatctaaacgcatcacctctgggtaaaaacttttacccagcaaacccgctggcgttccggcggcgtcgaagaatgtcatggcgattttaaataacccggcggcagcgggtcctaacacgatccccaccaacactgtgctgcacgagttacgcgccgaccagatggagtgggcaatgttggttgaccagacaaaactccacgcgcctttaatgtatcgggcagactcaaacagattcaatttgaaggcgttatggatatttcggcggcgtaattcgcgcgcggcaaaccaccagtacatggtgccgccaaccagattcgacacgtaccaggcaataacaaaacccgcaaaaccaaagtcaaaataccaggctacgacgctccccgctgcgcgcagaaaaggtttcgtcgcctgctgtacagcaattaaatcgaagcgatctaccgcacgcagaatgccggtcggcgtggaggaagccattgaaggaatgagcgtgcaatagagcgctgccagccaaaaactttggtcatccagacctaatgaatgggaaaggaatggcagtaaggcaatgccaccgacaatcgccaccgcgccgctgacgatatccagcgagaaggaaaatgagacgacattgcggaattgctgcggattattgttggttaatgctggtgttccgtactgaaccaccagttgccatgtctgaaacttaataaaatcgctgatcgacttggcgtacgattgcacaatcaccagtacgccaaacatggcgggcgtcatccctttaccggcacacgagagcgccaacagccccagcaaggcgctcacgacattactggagcctaaccaggcgctattgcgaataatggtgcgaaacgcgccatctgcaaaccaatgtttgatgttaaaacccgccaattcagcctgaccttatcgttgatagtaaaaagtatcccgccagccttaagttaaacttcggcggtcagaaacgatggcaaccagagaaaccgccttctgtgcctgttccagcacttcgctgtagggcgctctggaatcaatctcaagaatttttgtgccgttatagccaatcttcgacatgacaccgattttgtcctgcagctcggcatagtcatggtcaggcttgcgggagatggcagtctcaatatcaatgcccaggcgaataattaattccgggcgatattgcgccatttgttggtataaacgccgttcgcgctgcgccagaaacatgctgattttcccggtcgcacgttcgacgccaatccccggtccatcataataaaagcccgaaatttcagcctgcgggaagcgatcgctgaccaccagaacgccactttgcgccagtcgctgaaccttgcgtagattcgccattcttcgcagcgagaagcagtacataatcaccgccgcccatagcgccggagatttggttttcatgctttgggttttcgaggatttggccgccagtcgccgttccagccagacgccaaccaacggcaatcgtttgattttgtcgccgtcttcgccggagagcagccccagatagcgccgctcggtttgccagtgttgttgcagcgatttcaccaggtcggtggtcagtgtggatttaccggtgccatcacacccgaccaccgcaatcagccccggaatgtagttgggctgcggcgcggttgtactattaacagtttgagtttgtagtgcatccattcgttaaatcatcccctatccattttggtgatcgggaaagcgcggcgtgaattgcgcgtagtgacgcttgcagaatttcatcggcggggtgtcgcccatccagttcaaggatctttgcgccattgaatgtcagttgcggcgtaacggcgattttttcctgtaacgctgccagttggtggtcaggtttacgcgcaaacgcggtttgttcatcaatgccaagacgaatcaacaatacgggcaaataagatgccatccattggtacagcttcagctcgcgctgccttaacatttttatccaaccgttaccgcccgtggtttttgccaattgcgggccatcaaagcgaaaccccggcacttcaacctgcgggtagcggtcggtgatgagcagaaagccttgctggcttttacacaacattttgcgaaacttgtacgcccgccagcaggaaagcagatagataaccagtgcagtaatattgccaggcggtgttgagggcttttcgtgcacatgtgccgctttacttcgcagataacgcccaaaaggtgcgccaataacagggagctgtgaaatccattcgccaattcgcccggacgattgcccgagataaatgtgttctgttggcattcttgctgccagttcatttaccaggcttgccgtgagggtcgatttacctgaaccatcacatcctacaatggcaataacacgcactggcgtggaattaattattgacatattacgttgattcacgaaaaacccggcagtaaataatgtattgaatattacgtggtccgtgctcagaatatccgttcaaccttattgtgacaatggttaattgtgacattgacctgaattacgctttcataaaaacatattaaccaaataaatatttttaatggatatttaaattaaaggatatattcatgcagtcaataacacctccattaattgccgttattggtagcgatggttcaggcaagtcaacggtgtgtgaacatcttattaccgttgtcgaaaaatatggtgctgccgaaagagttcatttaggaaaacaggccggaaatgtcggtcgtgcagtgacaaaattaccgttgatgggaaaatccttacataaaacaattgaacgaaatcaggtgaaaacagcaaaaaaattgcctggaccagttccggcgctggtaattacagcgtttgtcgcccgtcgcttactgcgctttcgtcatatgcttgcctgtcgtcgtcgcgggttaattgttctaaccgaccgttatcctcaggaccaaattcctggcgcttacgatggtacggtgttcccacctaacgttgaaggtggtcgttttgtctcatggctggcaagccaggaacgtaaagcgtttcactggatggcgagccataagcctgatctggtcatcaaactcaatgttgaccttgaagttgcctgtgcacgtaaacccgaccataaacgggaatcgctggcgaggaagattgccataacgccacagttaacctttggtggtgcacaactggttgatatcgatgccaatcagccactggaacaggtgttggttgatgcagaaaaagcgattacggattttatgaccgcgcgtggttatcactagtcaaaaatggaaatgcccgatcgccaggaccgggcattttcaggaaggttaaatcaactgcaatgctatccagtacagcccaccagaaagaaaaattgccgccggtaaagtaaatacccacgccatcaggatgctggttaccgttttacgctgtaacccaccgccgtccaccaccatcgtccctgcaactgcagacgagaggacgtgtgttgtggagacgggcatcccaatataactggcaagaccgatagacactgccgccgtcatttgtgccgccatgccttgcgcatacgtcatgccgcgcttaccaatcttctcaccgatggtcatcgctacacgacgccagccaatcatggtgccaatgccgagcgccagtgctaccgccatgatgatccacaccggagcgtactcaatggtgcttaacatatcgctgcgaagttttttcagcaggttctggtcttctttactgacgcctggcagtttcgctagcttcgcggaggtatcagagatgcacagcataatgcggcgcagctggctgcgctgactcacgcttaacggctcgtaactttccatattgcctggcagcatcgttttaacgcgcgcaatagcatcaaaggtatttgccggatgacagtgaaactctgttacttgcgtgccatcagtcgatgctgcaggcaatggaggttccatcgcaatcaacttctgcggcagttcaggatgctgttgcaggtagtgttcgaagttggtaacggcatcgcgggtacgggtaatttcatagccggacgcattcatattgacgacgaagccagcaggggcaatccccaccagtaccagcattaccaggccgatccctttttgtccgtcgttcgcgccgtgcgaaaacgccacgcccgcagcggaaacaatcagcgcaatacgcgtccagaatggcggtttacgtttgccttttttctttttgcgatcttccggaatgcggtgaatacggtcacgctttttcgtcccgctccagtagcgtcgcagcaggaatatcaggcctcccgcaatgaccaggccgacgataggggaaacaatcagcgaggagaaaattttggtcacttcacgcaggtttaacgcatccatcaccgatgagccggttaacagcgcgttggttaaaccgatgccgataatcgcaccaatcaaggtgtgcgaactggaggccggtaaaccgaagaaccacgttcccaggttccagataatcgccgccagcagcatggaaaagaccatcgccaggccgtgggttgaccccatattcagcaacaaatcggttggcaacatatggacaatggcataggcaacgctaagtccgcccaataacacgccaaaaaagttaaaaaatgccgccatcaccacagcaagttgtggttgcatggcacgagtataaataacggctgccaccgcattcgccgtgtcatgaaaaccattgattgcttcgtagaacaacacaaatgccagagcaagcaataacaaaagccctgtgtatatatcaaggccaacaaataaatttagcatatattagattacgccattttgaatttacgaacggacgcattatcagtgactttaacggcatgggcaaagtgaaatatcattttttaacgataaaaagagtgttatttcttgtgtatcagacaataagcattcattcaaaacctttagaaataatcaaaacacaggtattccactggttaatatattcacatatgaaatgaataaatattggaatatataaatattgaatattttgattaatccccgtactgattattcttcataatcagtacggggttgctacaacatgtattactttttcaccacaattaacggttcaatatcactctcttttttgatgaccagtgattcatcaccgcgcaaacacgtcccaccgtagttgccgccaacggtgaaggtacatacctgaatgtatttaccgtccactttcggcaaacaccacagttgctgatagatgtttttctgctcggcaaatttaccgctggttttgtccagcacctcttcatgatggctgacgaggtcgatattgctgccacagcgaccggcgatcggtttcactgcgtaacctgttttcaccagttcatcattaacagtgaaatcggtatccagcaggtaacgatggtgcgggaacagcgaccagaggatcggcagaatcgctttgttgccggggatcaccgtccacagcggctcaaagaccagcacttccgggcgcagcaatacgtcgataagacgcacttcgttttgcggatgaccggtacggattggcaccgcagcaaactcacggtcgctaacttcacgaatctgatcaaacgcggtttcccacgcccaggttttccacacgcagttaaccagtcgcccttccccatcaatcagttgcccggcagcatcccagcccagttcatccaatccacgcaagatacgcgtttcaaagcccgcctggtgcagcgcctgctccataaactgcgcgtgatagttttcctcgatatctttgtcctgcatgatatggacaaacggacgtgcacgactgtgtttccaggcaccagccaattcgttaatcagcccttccgccggattgaagccgttgcctttatagccctgctccgcccaacgttcgaggatcaagcccgcttcggtatgacaggaggcggagtcggcgttgtactcgtaaaccttcaggccacgctcatccatgcagaaatccatacgaccagtgatcatatggtgacggcgacgctgccaggagagacgcaaacgtggccagaggattttcgggatgtcgaacagcgccagcaggttgtcatctttcagcaccttgtcggttgcgtgaagatacatcaggtgcagctcgttggtggctttaattagctcctgctcggcactctcggtaatggtgtagtaatgataaggatcctgattgatcacctgaccgttggcctgcacataggcgttttgcagcggatctttttcatccagccatttaccgtcaaactggcctttgttttccaggcgcgctccgctgattttcagcagctcgcctgcaatttccggctgcggtaagctgtattcagtatcttccgtctggatcatccagcccagaatggtggtgtcatcaaaagtgtctttcagggtatagcagccgttttcgaccaccatctccagctcgcgcgtccactgttgcccttgcggcaacggggaatgaatcacgttctgttccgcaatacggactttgttgccatgcaattgggtaatgatggcgacatggccagtgtctttaaattcaccgcctttatcccagataagaagcgcacccgcgaccggcgcacgcggcgagccgttaggaaatgcctgcaatggcaggatgttgtcattaaccacttctcgcaggaagcgcagcgagaaaatctcccacgccatacccacgtcagtaaagaccacaccgtaattcagaaagagaaaacggcgagcaaattcaacgcattgccacttgtggcccatatattcgtcgtcgatatagctacggaatacggcgtcatcttcgtattcctgcggatcgagagaactgtaatctgaagagtagattgctaccccacctggggcgtagcccaataatgtcccgaacggggcatcctggctggtcgttcctttgctcatcactttacctttaacaatacaacctaagcagttggcgtaattgttgtgctctgattacctgctcagcgacattaaccggacagaggtcagactaatcatacacctcatcgcagcggctggcgcaaagggttaaaaaattcacattctgtacagcaagtgacctgctacactgcttcaacactaccactcagaaggcaactcactatgacagacaatacttatcagcccgcgaaagtctggacgtgggataaatccgctggcggcgcgttcgccaatatcaatcgcccggtttctggtccgacgcatgaaaaaacgctgcccgttggcaaacacccattgcaactttattcgctgggaacgccgaacggtcagaaagtaacgattatgcttgaggagctgctggcgctgggcgttactggtgcagagtacgacgcctggctgattcgtattggcgatggcgatcaattctccagcggctttgtcgaagtgaacccaaactcgaagatcccggcgctgcgcgatcatacgcataatccgccgatccgcgtgtttgaatctggttcgatcctgctttatctggcggagaaatttggctacttcctgccgcaggatttggcaaagcgtactgaaacgatgaactggctgttctggttacagggcgcggcaccgttcctcggcggtggttttggtcacttttaccattacgcaccggtaaagattgagtacgccatcaaccgctttaccatggaagccaaacgtctgctcgacgtgctggataagcaactggcgcagcataagtttgttgcgggcgatgagtacaccattgcggatatggcgatttggccgtggtttggcaacgtggtgttaggtggtgtgtatgatgccgctgagtttcttgatgcgggcagttataagcatgtacaacgctgggcgaaagaagtaggcgaacgtccggcggtgaaacgtgggcgtattgttaaccgcaccaacggaccgctgaatgagcagttgcatgagcgccatgacgccagtgatttcgagacgaatacggaagataagcgtcaggggtaagggttggtgttcgtcgcagcaagccatccaggccggataaggcgttcacgccgcatccggcaatcgtgcacaatgcctgatgcgacgctgccgcgtcttatcaggcctacgaaagctaatcatcacgcgctggtaatgtcgtaatccatttggcgcagtgcgtctaatgtggctttggcttcatcttcgtcgatgatgctcatggcaaatccgacgtgtaccagcacccactggcccagtagatcggcagggttaccttcacaaatcagggcgatattcacatcgcgcttgataccacatacttcaacctgcgcaagctggtgaatatcttcaccgacagccagcacctggcctggaacgccaatacacattattaactccggttattcaacttcaatacttttgacgatcagcgaatcgccggtatcgacacgcaaccgctcgccgtgacagagcggacactgcgcatcgtgctgatgaatctccaccacctggctgcaatcccagcaccaagcctgggcgggtttatagacgatatgtaaatcgcacccttgcgccaccgttccgtggcagacaatttcaaaactaaaacggacggcgctctcctcaacgcaggagagcgcgccaatttccagccacacggcggtgacgcgcttaacatcgtgctgctccgcctgccgttggataatttcaacggcgctctggcaaagagacaactcatgcattttcgccactcctgcgaccaaacagcagggcgcgacgccctgcgtgtggtacatccggattcgtgactggcagcgaaaggatcattcgtgcgcagtcatccgtcaggcgttggccctcttcaatcgacatgctgtgcgaaagcggcgacatcagcgaacaggagagatattgcgaaacaccgtccagttcgccaacggtaaaggtcatagtgccatacggcagttgcagaccaattttttcactcactttgcgcagcggccagagttgatccgggccggggaagataactgcactcagcatccacggggtgatcacacaccccgtccactgaccttcgaacagcgtaaaatcagaaacatacaccggcattgaaggatgcagaaaagagagatcgtgcatcgaacgccgggcaatttcttcaaacgctgcctgtacttgcgccttcggggaggtctggaaacctgctatctcttcagtcatgaatcgcctcccgtgggatggcttccacgccagattcacgcagcgcagccagaacctgctcaagcgcaggttcaatcattgcttcaaccgtcggcgttaagccgatgtgtggctccagcgattccgggatcacgccgaccagggtcagctttttcggaaactcgccggtgaagcgcagggccgacaaaacgtcggccaggccaagctgatgcggagagattttgttggtaaacaacgccggaacttcttcatcccgcaggatcatcatcgttcccggcgcgttctttttcgagacaatggcatccgcaataatcaaatgatcgcgatttgccatgtcgccaagcagctccattcccgccgtgccgccatcgaggatctcaacataatccggcagaatgtatcgttgctctaacgcttcgacaatccgcacaccgatggcttcatcggtcagcaaaatattgccgacccctaagactaaaatacgcattacagaaccttcactgaaaccacttcgttgccgtcagcatccactacgtgtaccgcacaggccatgcacgggtcaaaggagtgaatggtacgcaccacttccagcggtttattcggatcggcaaccggtgtacccaccagcgactgctcgtaaggaccgacgtcatcattgaagttacgcggaccagagttccaggttgatggaacaaccgcctggtagttgctgatgataccgtctttaataaccatccagtgagagagcataccgcgcggcgcttcgaggaagccaacacctttgaattcacccgttgccggaatgttcggcttcacaaaggtggtgtgatcgcctttgccgatattggtgatcagtgcactgtattggttttgcaggatatcctgcaattcacagcagtgaacggtacgaccaataatacggcccagcgtggagtgcagctgtgccacttccagcgtgttgccagtcagtttctgataaatcgcaacgatttcattcagtttgttctgggtagattcgcgacctgccgccagtttcaccagcatattagccagtggccccacttctaccgttttgccgtagaaagtcggtgatttcacccaggaatatttcccgtcgtcagaccaaccatcataagccggaatggtggtgccttcccacggtgcctgcggcgcttcgtctttataccaggagtgcttcgcgctttcctgaatgcctttgatcaggtattcatcggaatgagaagtgatcggacgatacgaggacagatccgcattctcaatgtagccgcccgggaacaggaagctgccgtttttactgtcggtcgggaattccggcacgctcaggtagttcaccgcacctttaccgcgtgtcagccattccgggtagaacgcggcaataactgcggtatcaaccttataaacctgctcaacaaagtcgctcagtttgtcgatgaaagacttgatgtacatcaggcgctcaaggttcagcacgcccaaaccgtcgaggttgatcgggttcgcgacaccacctaccgccaggttctgaatgtgcggcgttttaccgcccagcagcgccacgacgcggttagcgtcacgctggcactccaacgcttgcaggtagtgcgctaccgcaatcaggttcacttccggcggcagtttcatcgccggatgaccccagtagccattagcgaaaatacccaactgaccgctggcaaccagatctttgatcttgttctgaactttggtgaactcttccggactgttcaggtgccaggtcgaaacgcctttcagcatttcggaggctttggttgggtcagcttgcagtgcagaagtgatgtccacccagtccagcgccgaaagctgatagaaatgaacaatatggtcatgcgtggtgtgcgcagccagaatgatgttacggatgtattgcgcgttaaccggaacgtcgatattcagcgcactttctgccgcacgaacggaagacagcgcgtgagtggtagtacatacgccacagatacgttgcacaatcatccatgcatcgcgcggatcgcggtttttcacgatctcttccatgccgcgccacatggtaccggaagcccatgctttcgaaacgacgccattttcgatttcgcaatcgatgcgtaaatgcccctcaatacgggttaccggatcaatagtaattctctggctcatgctttgctcgcctcatgacgattatgatcgttttgttttaaaggaggaagtatcggcagtagacgaatgagtacgatgtaagcgcaaatctcaatagccacaaaaccaatagaaatcaacagttcttcccaggtcgggaagtaggcgtaaccgccgcccgggttgaatgccaccagcgaataggtcagacgccaggttgcacaacctaacagtgcgctcagtgctgacaggaacagcatgcgggaatcattacgcagcttcgccacacgcagaacgaccagcgggaagagcatcagcaggacttcaatccagaacatcacggagtagaagtcaccggcaaacgctaacgacagcttgtcgcgatagataagctcgccaaagcgcagcacgatgaaaatcgccagcaacacactgatggtgttggtcagcttaacaaacagactcttttcatccggaccgttgccacgcagacccgcctgcaccagcgaaccttcaaagatgacaatcgagaagcccatgatgaacgccgtcagcagcgagaacagcggcaacatttcatagctctgccacaacggatgcaccttgtagcccgccgagatcatcagcgaccccattgaagactggtgcatggtcggcagcagcgcaccgagcgcgatgatgaagaacatcaccttgtttagtcgctgtagcgacaccttccaccccagacgttcaaacagtgccggagcaaactccagtgccatcacgccgatatagatggtcatacagaccgccgtctcgaacagtaccgagttcacgttgaagtgacccggaatgtagaagtacggcaggttccagtagcgacccacgtcgatagtgatcgacaagccacccagtgagtaaccaaacagactcgccaacagcgccggacgcaccagcggatggtattgcccacggttaaagacgtataccgcccacgccagcgcccagccgccacaggcaaagccggtgccaatcagcaggtcaaacgcgatccacacgccccacgggaagccgccgttcaggtcagagacagagcccagaccgaacaccagacgcttcacaatcaggagcatacagatgacgattaacggtccaaaaatcatgaccggtttactgatgattttgccgcccagcggttgtggatcatgactcatgatcgtctcctccgtcgtgatggtcgtttttggtgttgcgacgaaccagcacggttaagcccgccagcacagccagtggtagcatcatgcctttatacagggtgtgttgaatattttcggaacgcgcaccggtagaaagatcgtccagtttcggcaggtcgagattttcataaggcacacccgtcagtaccagaacctgagtaccgccgccctctttctcgccgtacagatgcggataatatttcggcaccgtatgcaggtaagtgtcgccagatttcagcgtctgacgcggatagtggtattcgctgccaggcttcagcgccagacgttttttcgcctccgccatcagctcttcacgcgtaccgaaaatcaccgcgcccgccgggcacacttctacgcagccaggtagaccgcctttatcgagacgttccacacctttctggttgcacagctcgcacttatgcagcgcaccaaacgggttgttgtagtcgtacttcggcacgttgtacggacaggcgaccatgcagtaacggcagccggtgcacacatctttgtcgtaatggacaatgccggttttcggatcttttttcagtgcagagaccgggcacacagagacacagttcggatcgacgcagtgcatacactgtttcttaatgtacgcgtagccgttctcctcctggtctttgttgacccctgtgccgctggtccacacctgaatgatgttattggtatacggcgacagtttgtcgttgttcgaccaggtctgttccccttgcgggttacgttcagggaaattgatatcctgacacttggtgacgcaagcctggcagcctacgcacaaggtcgagtcgtacaacatccccagcgatcccggaattggcgggcggttttcagcagccgcatgactgacagacggcagcgcgcccgtcagcaatgccccgcaggaggctgctttaataaaattacgtctgttcacggttattctccccgtgagtcagcgttatctttcttttgctgacgacccagttcacgcaccgccatcacgctgacaccggcaaccaacccaaccacaccgccgagcaaaccaatagcgcctgcagagacgttgccgccctctttagcgttaacatccggtttctgtgaacgcggagtttgattttcgacgttggcaagctgatggatgcctttatggaagccgataccttcttcgttacagccatagcacgggtgaccaatcgccaccggccacacaccgccaacatcgcagaattgcagcgttgagcagttgccgtaagtttctggccctttacagccgaggtggtacaggcaccagccttcgcggtggccttcatcaccgaactctttggcaaaacgaccagcatcgaagtgcgggcgacgttcgcagtgttcgtgaatcagacggccataggcgaaggtcggacggtttttgtcatccagtttcggcggtttgccgtaagtgatgatgtgcgcaacggtcgcgaggaagttgtgcgggttcggcgggcagcccggaatattgataacggttttgcctggcagaacttcttgcaggctgactgcgccagttgggttaactccagctgcggcaacaccgccccacgcagagcaggaaccgatagcgataatggctgctgcgccttccgccgctttgcggatgtgatccacaatcggctcaccggcaaccatgcaataaataccgttatcttttaatgggatggaaccatccaccactaacacatactgccctttgtacttctcgagagcgttatgtttgttctcttcgacctgatgaccgaaggcggcggaaagcacttcgtgatactccagagagatagtctccagtacgaggttttctaccgttggatgcgttgcacgaagcagagattccgtacaaccggtgcactcctgcgcgccaatccagataactggcggacgctgcgggttagtaaccgattcggccatctctgcagcggctttgctacttaaccccatggtggcggctaatgctgcacaaagcttcatgaaatcacgacggttaatgccgtgagaatggatgagggtgttatctccagtcatttatagttattccgttgcgaagacctggcatatattttgcctcaatcgcaaaatcaataatgcgatcgatgcgccatttaccacacatttattatggttatcgatatcatgatactgcggcggggcgctaaaacgaagggaagaagcattagtgtaattaattaaagcaagataatacgtatgtttgatcaattttcgaggcgataaccggccataaaaaagcgcaacgtagaacaggaattattctcacgaaagaaatccattaccatctctttatccagtccatagcggcgcgtcagaatacccgcttcccaggcgctaagctggcgatctccggtcttttcgtacatccggtgtgagtagcctaatacaaaaccgcgtttataatcggcacagaattttgtcacattaaccgcactgtcggcatgcgttgcttttaatcccgccattaagcctttaccaaaatggttattcatcgttcacctcattcgctatatattgtcatatatagcgatattttaggcaaagaacgacttttgcgcacgctattttttcatgcttgtttaagacgtaatcccgtaagagataaacctatcaggagagatatttatcgaaccatttcagtgtcctttgccaggcaagatcggcggcagatttgtcataacggggcgtggaatcattatggaatccgtgattaacccccggatagatatacgcctcataaaccttattattggctttcaacgccgcctcgtaagcaggccagccctcgttgattcgggtgtccagttccgcgaagtggagtagtaaaggcgcttcaatcttcgccacatcggcagtgggtgcctgacgaccataaaacggcaccgcgcaggccagttccggatacgcgacagccgccgcgttcgatacgccaccgccatagcaaaatccggtaatacccactttgcctgtcgcttgcggatagcgttgcataaactcaattgcggcaaagaaatcattcatcagtttgttggatcaacctgctgttgcagctcacgacctttatcatcatttcccggataacctccaacggaacttaagccgtcaggtgccagggcgatataccccgccttcgccactcgccgtgccacatcttcgatatacggattcagtccacgattctcatgcaccaccactacggctggcgttttgccgctcatctttgcgggcttcaccagataaccccgcacctcgccgtgaccatttggcgaaggatacgtgatgtactcagcaacaatttccgggtcggtaaactctacctgagtcgccagcgcataatttggcttgagcaaatcaaacaacgctaatgccgtcatcccgcctaccgcacttcgccgcaaggttgaggaactcacgtttcgagattttcccgtgagcgtaatagtcatagtaatccagcaactcttgtgggaaatctttggcggttaaacgcggcatcgttgcactcctcagttggtgtttttttaagcaaagcataagcacgtgtttttgcccagtttttcgtcactctgtgagccagactacgggatacgcgctggcgaatcgctaaactagaaacattgtttcgaaattgaacggtggaaaggagaggtcatggtctggttagcgaatcccgaacgttacaggcaaatgcaataccgctattgcggaaaaagtggtttacgcctgcccgcgttatcgctcggtttatggcacaatttcggtcacgttaacgcgctggaatcacagcgtgcgatcctgcgtaaagcgtttgatttgggcattacgcactttgatttagccaacaattacgggccgcctccaggaagcgcagaagagaactttggtcgcctgctgcgggaggattttgccgcttatcgcgatgaactgattatctctaccaaggctggctacgatatgtggcccggcccttacggctctggcggttcacgtaaatacctgctcgccagcctcgaccaaagcctgaagcgtatggggcttgagtatgtcgatatcttttactctcatcgcgtcgatgaaaatacgccgatggaagaaaccgcctctgcgctggctcatgcggtacaaagcggtaaggcgctgtatgtcgggatctcctcttactcgccagagcggacgcaaaaaatggtcgagttgctgcgcgagtggaaaattccgctgttaattcatcaaccttcgtacaatttactgaaccgctgggtggataaaagcggcctgctggataccctgcaaaataacggcgtgggctgtattgcctttactcctctggctcagggattgctgaccggaaaatatctcaacggcattccgcaagattcacggatgcatcgtgaagggaataaagttcgtggtctgacaccgaaaatgcttaccgaagccaacctcaacagcctgcgcttattgaatgaaatggcacagcagcgtggacaatcaatggcgcaaatggcgttaagctggttgctgaaagatgatcgcgtgacgtcggtattgattggtgccagccgcgcggagcaactagaggagaacgtgcaggcgctgaataatctgacatttagcaccaaggagctggcgcagattgatcagcatatcgccgatggcgagctgaatctgtggcaggcgtcttccgataaatgacctgttaataacgggcgcgcgaaccgcgcccgaatcagatcagtgattatgacgagtcagtcggtcaagatagcccatcacaaatgcagaaagcacaaacgtcagatggataatgacgtaccacatcagtttgttatccgggacatttttcgcatccataaagacgcgcagtaagtgaatggaagaaattgccacaatcgacgctgctactttgtttttcagcgacgttgcgtccattttccccagccagttcagcttctctttgttctcggagatatccagctgtgagacgaaattctcataaccggaaaacatcaccatcaccagcaaaccgccaaccagcgtcatatccaccagcgacagcaacacgaggatcaaatctgattccgccatcgagaagatattcggcagtacgtgaataatctcctggaagaacttcagcgccagggcaactaacgccagcgaaaggccaaagtacacgggggcaagcagccagcgagaagcatacattgcattttcaagaaaacgttccatacattcctgtcgtgtagttaaaacgggcaacagtatatcgcaattgagtaaacagcacgcaacagcaaatcaacatatacgttaaacctttgtcgcataattctgaggtttagggatcttcctggttcccttatcaacgcatcgagaacgtctacccttaaaggacgttgaacctgaagggagaaaaacgatgtctcatttaaaagacgcgaccacgcagtattacactggtgaatatcccaaacagaaacaaccgacgccaggcatccaggcgaagatgacaccggtaccggattgcggcgagaaaacctatgttggtagcggtcgcctgaaagatcgtaaagcactggtgacagggggcgattccggaataggtcgcgctgccgccatcgcttacgcgcgtgaaggggctgacgtggcgatcagttatcttcccgtggaagaagaagacgctcaggatgtgaaaaagatcattgaagaatgcggacgcaaagccgttctgctgccaggcgatttaagcgatgagaaatttgcccgttcgctggttcacgaagcgcacaaggcgttaggcgggctggatattatggcgctggtcgccgggaaacaggttgccattccggatattgcagacctcaccagcgaacagtttcaaaagacctttgccattaacgttttcgcgctgttctggctaacccaggaagcgatccccctgctaccgaaaggtgcaagtatcatcaccacttcgtcaatccaggcataccagccaagtccgcatttactggactatgcggctacgaaggcggcgattctgaactacagccgtggcttggcaaaacaggtcgcggagaaaggtattcgggtgaatattgtcgcgccaggcccgatctggacagcactgcaaatttccggcggacaaacgcaggataagatcccgcagtttggtcagcaaacgccgatgaaacgtgcggggcaaccggcggaactggcccctgtatatgtttatctggcaagtcaggagtcgagctacgtcaccgcagaagtgcacggcgtgtgcggcggcgagcatttaggttaaaaaaatgcccggttgtgaaaagcaaccgggcatcattgtgaattcactcttacctgatgtggcgaaaacgccttatccgcctacaaacgcatgaagattcaacatgttgcaatagattttgtaggcctgataagcgtagcgcatcaggcattgagcacctaatgccggatgcgtcgtgaacgccttatccggcctacaaacgcacgaagattcaacatgttgcaatagattttgtaggcctgatgagcgtagcgcatcaggcaattctactttacttcgctttggcggtttcttcgccgaccagacctatcttcaggtaacccgcctgatgcagcgtatccattaccttcatcaacgtctcgtaatcgacggttttgtccgctcggaagaagatggtggtgtctttcttgccttcggttaacgcattcaacgccgtaatcattgtttcatcggtgaccggatcgttaccgataaacatcgagttgtctgccttcaccgacagataaaccggtttttccgggcgcggctgcggcgtgctggtagaagcaggcaagttcaccttcacatctaccgtcgctaacggtgccgccaccataaagataatcagcagaaccaacatcacgtcgataaacggcgtcacgttgatatcatgcatttcgccgttatcgtcgaggttttcgttaagatgcattgccatcggatattatcctgcgcgtaatttttgtgcgacacgaaccggatgcgcagcggcgctggcttccagatccaggtcacggctttgcagcaacaatacctgcgctgcaacatcacccagcatcgctttaaagccgccaatctggcgtgcaaatacgttatagataacgaccgcaggaatcgctgccacgaggccgattgccgttgctaacagagcttctgcgatacccggcgcaacgactgccaggttagtggtctgcgtttgcgcgataccaataaagctgttcatgatgccccagaccgtaccaaacagaccaacgaacggagaaatcgcgccgatggttgccagatagccgttaccgcggcccatttgacgacccactgcggcgacccgacgctccagacggaagctggtacgttctttaataccttcgttatcgtcgctgccttctgacagttccagctcattctgcgcttcattgagcaaatgcaggcttaagcttttgctaccaaaatcagcggcgatatcgttggcctggtttaaggaacgcgcttcagccagcagttgctgctcgcgcttaaggcgacgcttctgattgaagaactctacgctcttactgaagaagattgcccaggtgactacggaggccaaaataagcccaatcatcacgcacttaacgacaatatcggcgtgctgatacataccccagacggaaaggtccgtctgcattaaattattacccactgtgtatctccaggacgcaagtcacaaaatctgcgcataataatatcaaaacgacgtcgaattgatagtcgttctcattactatttgcatactgccgtacctttgctttcttttccttgcgtttacgcagtaaaaaagtcaccagcacgccatttgcgaaaattttctgctttatgccaattcttcaggatgcgcccgcgaatattcatgctagtttagacatccagacgtataaaaacaggaatcccgacatggcggacaaaaagcttgatactcaactggtgaatgcaggacgcagcaaaaaatacactctcggcgcggtaaatagcgtgattcagcgcgcttcttcgctggtctttgacagtgtagaagccaaaaaacacgcgacacgtaatcgcgccaatggagagttgttctatggacggcgcggaacgttaacccatttctccttacaacaagcgatgtgtgaactggaaggtggcgcaggctgcgtgctatttccctgcggggcggcagcggttgctaattccattcttgcttttatcgaacagggcgatcatgtgttgatgaccaacaccgcctatgaaccgagtcaggatttctgtagcaaaatcctcagcaaactgggcgtaacgacatcatggtttgatccgctgattggtgccgatatcgttaagcatctgcagccaaacactaaaatcgtgtttctggaatcgccaggctccatcaccatggaagtccacgacgttccggcgattgttgccgccgtacgcagtgtggtgccggatgccatcattatgatcgacaacacctgggcagccggtgtgctgtttaaggcgctggattttggcatcgatgtttctattcaagccgccaccaaatatctggttgggcattcagatgcgatgattggcactgccgtgtgcaatgcccgttgctgggagcagctacgggaaaatgcctatctgatgggccagatggtcgatgccgataccgcctatataaccagccgtggcctgcgcacattaggtgtgcgtttgcgtcaacatcatgaaagcagtctgaaagtggctgaatggctggcagaacatccgcaagttgcgcgagttaaccaccctgctctgcctggcagtaaaggtcacgaattctggaaacgagactttacaggcagcagcgggctattttcctttgtgcttaagaaaaaactcaataatgaagagctggcgaactatctggataacttcagtttattcagcatggcctactcgtggggcgggtatgaatcgttgatcctggcaaatcaaccagaacatatcgccgccattcgcccacaaggcgagatcgattttagcgggaccttgattcgcctgcatattggtctggaagatgtcgacgatctgattgccgatctggacgccggttttgcgcgaattgtataacattgccacttttggacaattttgcagacattttattgtgaaaagtcttaaattgttgcgtccgggatcaaggcgtcccggacgattcaggagtacaataggcagataaaggcttaaacgctgttccacaggaaagtccatggctgttattcaagatatcatcgctgcgctctggcaacacgactttgccgcgctggcggatcctcatattgttagcgttgtttactttgtcatgtttgccacgctgtttttagaaaacggcctgctgcccgcctcatttttgccaggcgacagcttgttgatactggcaggcgcattgattgcccagggggttatggattttctgcctacgattgcgattctgaccgccgcagcaagtctgggctgctggctaagttatattcaggggcgctggttagggaataccaaaacggtgaaaggctggctggcacagcttcctgctaaatatcaccagcgcgccacctgcatgtttgaccgccacggtctgctggcgctgctggctggacgttttcttgcatttgtccgtacgctgctgccaaccatggcgggaatttccggtctgccaaaccgccgcttccagtttttcaactggttaagtggattgctgtgggtcagcgtggtaaccagttttggctatgccttaagtatgattccgttcgttaaacgccatgaagatcaggtaatgacgttcctgatgatcctgccaattgccttgttaaccgctggcttgttaggcacgctgtttgtggtgattaaaaaaaaatactgtaacgcctgacgattttccccgttcccggttgctgtaccgggaacgtatttaattcccctgcatcgcccgcattcttgccgcatcttcccccggcgtcacaccgaagtaacgtttaaactcacggctaaattgcgatgcgctttcatagccgacgcgcatcgctgctgcgctggccttcatgccgtcatggatgatcatcatccgcgccttatgcagacggtaattcttcaaatactgcaacggcgaggtactggtgacagacttaaaattatggtggaacgccgatacgctcatgttggcttctgccgccagttgctcgacgctcaggttttcggtgtatttattctcaatccgtttcagcacgcggctaatcagactgaagtgagtctggcgactgaccagcgccagtaacgcgccgccgcaaggtccggtcagcacgtagtacagaatttcgcggatgatctgtttgccgagaatacgcgcatccagtggtcgctccatcacgtcgagtaaccgctccgccgcgcataaaatctcttctgataacgtggcggagttaatcccgctggctgccatcgacggctggaaatgctcatcttcgccaatgtccatcaacagttcctgtaactgcaaaatatcgacattgagacgcaaccctgccagcggcacctctgacgtggcataggtttcgcactcaaacggcaacggcaccgtcagcagcaggtattcattggcatcataacgaaacacgcgttcattgatataaccgattttatgcccggaaaagagaattatgatgccaggctcgtacatcaccggtgtacgtgcgaaaggcgtctcgccatacaacaaacgcacatcgggcaacagttctgacaaactattttctttatttttcagtttattaactttatccgccagcaagcggcaaatctcttcacgtttcatatcgcgtaatttcttaggaataatgcggcaatttgattgtgcgcaattttgtagcatttctccagcactctggagaaataggcaagacattggcagaaatgagcattgagagccagggcgctggcgatcacaatgaaaaacatcaggcagatcgttctctgccctcatattggcccagcaaagggagcaagtaatgaacaactttaatctgcacaccccaacccgcattctgtttggtaaaggcgcaatcgctggtttacgcgaacaaattcctcacgatgctcgcgtattgattacctacggcggcggcagcgtgaaaaaaaccggcgttctcgatcaagttctggatgccctgaaaggcatggacgtgctggaatttggcggtattgagccaaacccggcttatgaaacgctgatgaacgccgtgaaactggttcgcgaacagaaagtgactttcctgctggcggttggcggcggttctgtactggacggcaccaaatttatcgccgcagcggctaactatccggaaaatatcgatccgtggcacattctgcaaacgggcggtaaagagattaaaagcgccatcccgatgggctgtgtgctgacgctgccagcaaccggttcagaatccaacgcaggcgcggtgatctcccgtaaaaccacaggcgacaagcaggcgttccattctgcccatgttcagccggtatttgccgtgctcgatccggtttatacctacaccctgccgccgcgtcaggtggctaacggcgtagtggacgcctttgtacacaccgtggaacagtatgttaccaaaccggttgatgccaaaattcaggaccgtttcgcagaaggcattttgctgacgctaatcgaagatggtccgaaagccctgaaagagccagaaaactacgatgtgcgcgccaacgtcatgtgggcggcgactcaggcgctgaacggtttgattggcgctggcgtaccgcaggactgggcaacgcatatgctgggccacgaactgactgcgatgcacggtctggatcacgcgcaaacactggctatcgtcctgcctgcactgtggaatgaaaaacgcgataccaagcgcgctaagctgctgcaatatgctgaacgcgtctggaacatcactgaaggttccgatgatgagcgtattgacgccgcgattgccgcaacccgcaatttctttgagcaattaggcgtgccgacccacctctccgactacggtctggacggcagctccatcccggctttgctgaaaaaactggaagagcacggcatgacccaactgggcgaaaatcatgacattacgttggatgtcagccgccgtatatacgaagccgcccgctaagctttttacgcctcaaactttcgttttcgggcatttcgtccagacttaagttcacaacacctcaccggagcctgctccggtgagttcatataaaggaggaacgtatggctaatccaaccgttattaagctacaggatggcaatgtcatgccccagctgggactgggcgtctggcaagcaagtaatgaggaagtaatcaccgccattcaaaaagcgttagaagtgggttatcgctcgattgataccgccgcggcctacaagaacgaagaaggtgtcggcaaagccctgaaaaatgcctcagtcaacagagaagaactgttcatcaccactaagctgtggaacgacgaccacaagcgcccccgcgaagccctgctcgacagcctgaaaaaactccagcttgattatatcgacctctacttaatgcactggcccgttcccgctatcgaccattatgtcgaagcatggaaaggcatgatcgaattgcaaaaagagggattaatcaaaagcatcggcgtgtgcaacttccagatccatcacctgcaacgcctgattgatgaaactggcgtgacgcctgtgataaaccagatcgaacttcatccgctgatgcaacaacgccagctacacgcctggaacgcgacacacaaaatccagaccgaatcctggagcccattagcgcaaggagggaaaggcgttttcgatcagaaagtcattcgcgatctggcagataaatacggcaaaaccccggcgcagattgttatccgctggcatctggatagcggcctggtggtgatcccgaaatcggtcacaccttcacgtattgccgaaaactttgatgtctgggatttccgtctcgacaaagacgaactcggcgaaattgcaaaactcgatcagggcaagcgtctcggtcccgatcctgaccagttcggcggctaacatgcaaattctcccggtggcggtaatgttccgctaccggacttttcagaaatcatttattcccctcgcgtcccgcccgttgttactcttccttgttcaggaatgccaaatataaggacatcatcatgcagagccggaagctcttaaaagaacaactcatctatatccgggataaacgcaacggagaggtgaaaaacagatgaaaataatacttctgtttttagcagccctggcaagttttaccgtacacgcacagcccccctcacagaccgtagaacaaacagtccggcatatttatcagaactataaatcagatgccactgccccttattttggtgaaaccggagagcgggcgataacttctgcgcgtattcaacaggcgcttaccctgaacgacaatcttacgctgccgggcaatattggctggctggattatgatccggtttgtgattgtcaggattttggcgatctggtgctagaaagcgttgcgataacccaaactgacgccgatcatgccgatgccgttgtgcgctttcgtatctttaaagatgataaagaaaagaccacgcagacactgaaaatggtggcggaaaatggtcgttgggtcattgacgatattgtcagcaatcatggcagcgtcttacaagcagttaatagcgagaatgaaaaaacgctggccgctttagcttcgttgcaaaaagaacagccggaagcctttgttgccgaactctttgaacatattgctgattatagctggccgtggacgtgggtggtttccgactcttaccgccaggcggttaatgccttctataaaaccaccttcaagacggccaataatcccgatgaagatatgcaaatagaacggcaatttatttacgacaatccgatctgttttggcgaagagtcgctattttcacgcgttgatgaaattcgagtcctggagaaaaccgccgattccgcccgcattcatgttcgttttacgctgaccaatggcaacaacgaagagcaagaactggttttacagcggcgcgaaggcaagtgggaaatcgctgattttatccgcccgaacagcggcagcctacttaagcagattgaggcaaaaactgccgccagattaaagcaatgagctgaattaaataacaattagccggaacaataaataaaagggaacactatatgaaaacgattttcaccgtgggagctgttgttctggcaacctgcttgctcagtggctgcgtcaatgagcaaaaggtcaatcagctggcgagcaatgtgcaaacattaaatgccaaaatcgcccggcttgagcaggatatgaaagcactacgcccacaaatctatgctgccaaatccgaagctaacagagccaatacgcgtcttgatgctcaggactattttgattgcctgcgctgcttgcgtatgtacgcagaatgataaaaaaatccccggtagcgtgtcagttgccggggatattttttaacgtccaaccgccgctttaggccgtttcttcgcaccagcattcaccggacgagattgcgtagacgacgctttttttgccgtagcaggcgtctgacgctgggtcgccatcggcgtatgtttcgtcaacgccggacgggtattgcggttctggcgacgagcttcacgcatctcttcaatggttggcgcaggcactaagcaatcgcgacggctgccaatcagatgctttttgcccatcgcttccagcgcctggcggattaacggccagtttgccggatcgtggtaacgcaacaacgctttatgcaaacgacgctgtttgtcgcccttcggtacgaagacgtcttcgctcttataaccaatcttcgccagcgggtttttcccggtgtaatacatggtggttgagttcgccagcggcgacggatagaagttctgcacctggtcgaggcggaagcggtgctttttcagccacagcgccagattcaccatatcttcatcacgcgtaccggggtgcgcggagatgaaataggggatcagatactgctctttacctgcctgttttgagtaagtatcgaacagctctttaaagcggtcatagctgcccatgcccggcttcatcatcttcgataacggcccttcttcggtatgttccggggcaatcttcagataaccgccgacgtgatgggtcgccagttctttgatatagcgcggatcttctacggctatgtcataacgcacaccagaggcaatcaggatctttttaatgcctttcagatcacgcgcacggcgatagaggttgatcgttggttcgtggttcgtgtccatgtgcggacaaatatccggataaacgcacgacaaacggcgacaagtttgttcagcgcgtggcgatttgcagcgcaacatatacatgttggcagttggcccaccaagatcggaaatcacgcccgtaaaacctggaacggtgtcgcggatcgcttcgatctcattaatgatcgaatcttcggaacggctctgaataatgcgcccttcgtgctcggtgatagaacagaaagagcagccgccaaagcagccacgcataatgttgaccgaaaaacggatcatttcgtaagccggaatacgggcattgccataggccggatgtggcacgcgcttgtatggcagcgcaaaaacgctgtccatctcttcggtagaaagcggaatagcaggcgggttgatccacacatagcggtcgccgtgtttttgcatcaatgcgcgggcacagcctgggttggtttcgtggtgcagaatacgcgaagcatgggcgtacagcactttatcgcccttcactttctcgaaagaaggcagcaacacgtaggttttttcccacggtttcgggcgcggtggctgcacggttacggctttggcttcctgctttttcggtgccaccggtttgttatccgcgcacggcaaatcttcaccatacggatgcgggattgggtcgatttttccaggggtatcaagacgggtggaatccacgccgctccagccaggcagcgcctctttcacgataatcgcggtattacgcacatcgcggatttcactaattggctcgcccatcgccagacgatgcgccacttccaccagcggacgctcaccgttaccaaacatcagcatgtcggctttcgaatccaccagcacggaacggcgcacggtatcggaccagtaatcataatgcgcggtacggcgcagactagcctcaataccgccgaggatcaccggtacatctttccacgcctctttacaacgctgggtataaaccagtgtggcgcgatccgggcgcttacccgcgacgttatccggcgtgtaggcatcgtcatgacgtaaacggcgatcggcggtataacggttgatcatcgaatccatgttgccagcagtaacaccgaaaaacagattcggtttacccagacgcataaagtcgtctttgctgctccagtccggctgggcgatgatcccgacgcgaaagccctgcgcttccagcatacgaccgcaaatcgccatcccgaagcttgggtgatcgacatacgcgtcgccagtaaccaaaatgatgtcgcagctatcccagccaagttgatccatctcttcacgagacatcggcaaaaacggtgccggtccaaaacaggcggcccagtactgcggccaggagaacaggtcgcgatccggttggatcagggagatagagctcattttgcttccagaaatgataaaaaaataatcaaaggccggggattataagccggaacgaaagagaaatcgaaaggtattccatactcgccctcctcgggcgagtatgaagattacggtaccggattgaccaacagttgcccaatcgagccacggtccgccatttccagcgtctgactgttgaagtagaacgggaagtgcgcccaggaaggctgaccgaaataaacaagcagctccacttgtccgtcaacccaaacggtatctttccagcctctgtcttccgggaacggcatcgcgccattcacgttacggatctggaacattacgccttcaatatggaacgcttgcggctcgtccgcgcgtaccgtccagcgttcccacgttccttgctgcgcggtgacatcaatacggttgacgtcccacagctgtccattaatacccgggtcatcacccagactgatatcgcgactgcgaattggcgaaccagccatgatttcagttggcagcaagcgcatcggaagactgtctgtgaccagcggcagaaggccggttgggcgcagcgttagcaccagggtagaaaccagaatactggatggctcaaagaagccacgaatacgatcaacaatgctcgccgcttcgccacaggtgatcgacacttcatcgccgttgctcatatccaccagaatctcgcggcgctcgcccggtgccagcgaaagttgcttcaccgatacaggagcaggcaggaatccctgatcgccagaaatcacatgtaacgggcgaccatcgttcatctgtagttgatagcgacgagagttcgacgcgttcagcagtcgcaagcgcacccagccacgcgagacttcaacgtacgggctttgtacaccgttaaccagcagcgtatcaccaacaaagccgccgcttcccggttcgttgtattctggcgtaccaaagttatccagccgtttatcctggataatgaccggaaaatcatccacaccataatggttggggataggcagcgacttgctgacttcatcttccaccagccacattccggcaaggccgttatagacctgctgagccgtgcggttgggagtattggcgtgataccacagagtagctgcgttctggcgaatgggcagtacgggtgcccagtcagcgtttggcgacatcatccgtgccggaccgcccatcagcgggcctggtacctgtagcccggccaccgtcattgagacattttctgtcaggcggttgctgtaaataagcttaacatcgtcgcccttccagacgcggatagtcggccccaggtaacgaccattgattccccagaccgacgcgcgtgtccctggcgtaaatgaccagtgcgcacgttgtacagtcataaacagcggttgcccacggcgagattcaagtagcggcggaacgggtagcggttgctgttgcccggctgcgctggccttcaggggaacagcgcctgcacaaagtgcaatccccgatgcctgaatgaactgacgccgactgagtgacatatttgctccatgtaaaactggctaaagtaataccgtgcaggaaagtgttccccgcaaaaatacagattgccgacttaaacttttccggcggcttcgcgttctgcgacttctttatcgagctcggcgattttttgttccattatcgaacgacaatgggcagccagctcacgaacctgatctttgccatactgactgacgtcaattggcggcagcatttcgacaatcaccagaccgttgtgcagtcgattaagattaatcttattcgaagttgtagagacgcacacgggaataatcgggacgcccgccgcaattgccgcgtgaaatgctccagtcttgaacggtagcaggccgcgaccacggctgcgggttccttccgggaacatccagatggaaatacggcgttttttgaagtgattcactacttccgcaatggtgccgtgagctttagtgcgattgtttctgtcgatcaataagttgccggttaaccagtacaactgcccgaagaaggggatccacagcaagctctttttacctaccgtcaccgtcggcggttgcacgatgttcgatgctgtcaccatgtcatagttgttctggtggttagcgatatagatagcattgccgtagctttcagcgtctgtaggtttacggcactcaactttcaggccaaacagcggcgcaagacggccaaacatatgcccaaaggtggccacatgtttcgggttacgcgggctgaaaaggcagtaaatggagccgaatacacagactaagatgctgtaaatcacggtaataataagacgaaagatatatagcataacaccctctgaaggtctgagagactggcattgtacgtcacctgaaatcaggttagggcattgttaaaagccgctctctggaaaagcgtattgttaatcgcaacgcatgaataaacaacggtttcaagggaatttttatcgtttccgggggttgaatacgctgccggatgacgacttaacgtttcatccggcgttccttgcaagcgggaggaaacagcgccctccccggcatattactcttcgctatcaccgctgctggcacggcgaggagagtcgatctcaacacgatcgatacgctgcaaaccgcgcatcaacgtaccgcggcgtccacgttcgccagtgactttctgtaactcttccgggcgcagtttaattttgcgtttcccaacatgaatggtcagcgtgctttgcggcggcagaacgtacaattgcgccagaccatcttctccacgcgcggcttctgccgatggaatgttgataatcttgttgcctttgcccttcgacagctgcggcagatcacttaccgggaacatcaacatacggcctgcctgagtgattgccagcagcatatcggaagcatcttcaatcaccaccggcggcataacatgggcattttccggtaaggtgatcaaagccttacctgcacggttacgcgccaccagatcgttaaaggtgcagacgaaaccgtaacccgcatcggaagccatcagcagtttctgatcgtcgctttccatcagcatatggtcaacggtcgccccaggcggcaacgttaatttgccggtgagcggctcgccctgaccacgcgccgacggcagcgtaatcgggtcaatggcatagctacgaccggtggaatcaacaaacactaccggttggttgctcttacctttcaccgccgctttgaagctatcacccgctttataattcaggcccggcgcgtcgatatcatggcctttagcgctgcgtacccagcccatctgcgacagcacaatggtgacaggttcagacggcagcatgtcgtgctcgctcatcgctttcgcttcttcgcgttcctgcaacggcgaacgacgatcgtcaccgtaggcttgcgcgtctgcctgcagttctttcttcagcaggttattcattttacgctcggaagccaaaatgccctgcaactggtcgcgctctttttccagttcactctgctcaccgcgaatcttcatctcttccagtttggcaagatgacgcagtttcagttcgaggatcgcttccgcctgggtttccgtaaggccaaaccgcgacatcagcgccggtttcggttcatcttcattacgaatgatctcaatcacttcgtcgatattgagaaacgccaccagcaaaccttcgaggatatgcaggcgcttgaggactttctccagacgatagttcagtcggcggcgcacggtatcgcggcggaacaccagccattcggagaggatttccagcaggtttttcaccgccggacgaccatccagaccgatcatattaaggttaatacgatagctcttttccagatcggtggtagcgaagaggtggttcatcacctgatccatatccacgcggttggaacgcggcacaatcaccaggcgggtcgggttctcgtggtcagattcatcgcgcagatcgtcaaccatcggcagctttttgttgcgcatttgcgcagcaatttgctccagtacgcgcgcacctgaaacctgatgcggcaatgcgctgataaccaccgcgccatcttctttcttccacaccgcgcgcatacgcactgaaccacgtccgttctcgtagattttacggatctcggcgcgcgaagtgataatttccgcttcagtcggataatccggcccctgcacgatatccagcagctgatcgagcgtggttttcggctggtcgattaatgcgattgccgcctgagccacttcacgcaggttatgcggtggaatatcggtcgccatgccgacggcaataccggtggtgccgttaagcaaaatgtttggcagacgggcaggtagcattttcggctcctgcaaagtgccgtcgaagtttggcacccagtcagccgtcccctgccccagctcgctcaatagcagctcggaatatttcgacaaccgggattcggtgtaacgcattgccgcgaacgatttcggatcgtccggcgcgccccagttcccctgaccatcaaccagcggataacggtaagagaacggttgcgccatcaggaccatcgcttcataacaggcgctatcgccgtgcggatggtatttacccagtacgtcaccgacggtacgggccgattttttaaatttggcgctggcattcaggcccagttcagacatcgcatacacaatgcggcgctgaacaggtttcagaccatcaccaataaacggcaacgcacggtccatgatcacgtacatggagtagtttaagtaggcgttttccgtaaattcatgtagcgcaaggcgctctgccatatcgctcattaattctgattcctcaacttattcgccagccttcaaaggggcaatattgccggagatactacattatctgccgcgtcgagtcacaggagatcagcgtgaatagcgccgccggacgtgctccgacggcgataaaggcatcaatgtgccttgatatacaactctttgctgtagacataatcctggggattatgcagcggaaaaccgccaacgtagggtttaagcagtttgattaacggctgatagtagataggaatcagcggtgcctgttggttgatgatcacttctgcctgctgatacaacgcattacgctttgtcgcatcagtgatctgcgtggcctggtttagtaaggcgtcatactgcgcatttttccagtgaccgacgttttcttcactatcgcttttgagcgtgttcaggaagctggaagcatcattgtacgtcgcatcccacgactgccgagacagcatgaaatcaccggctcgtcgggcatcaagataggttttccactccattgtgcgcagcgtcacctgtgcacccagccattttttccattcggaagacaacgctatcgcggtcttttcatgcagatcgtacttgttgtagaacagctcaaagcgtagcggatgagaggcgtcgtatcccgcctgtttcagcaaggcttttgccatcgcgacgcgctcactcattggcttttgcagttcatcgaacgtcgtcgcgctaaagccttttacctctggcggcgtcagcgtggttgcgggcgttctcaaccccagtaccttttgcgcaataagctgtcgatcaaccgtaagatatagcgcccgacgcactcgcacatcgttaaatggcggtttctcaaggttgaagttgtaatattcgctgttcagacgcggaataattcgtagctcgccaggcagtgatttttcaatggcgggaatttgctgcgccggaacccaggtgagatcgacctctcccgcgcgatagcggttatagccggtgaccgaattatctagcgccagatactcaacctgttgcaatactgtatgttgcgcatcgcggtactttggatttttgcgtgcagtaatcttttcgttaactacccactgatcaagcacaaaggcaccgttgtaaaccatgttctctggcttactccagctatcgccatgtttagcgatgacatgatgaggaaccgggaacagcgtcggccaggcgagcatcgtcgtgaaccaaggaaccggctgctcaagcgtaacttcaagagtacgatcatccgtcgctttgacacccagcgatgtaacatctgctttacccgcaacaatagctgcggcattgttaatgtgcgcctgtgccagatagccagcaaaagggcttgccgttttcgggtcaaccgcgcgctgccagccgaggacaaaatcctctgccgtcagaggctgaccgtcggaccactgcaaaccgctacgcagatggaaaatatagcgcttgccgccgtccagtatctcccagcgttcagcctgagcgggctgcacctggccttcaccgtccatccataccagaccttcaaacagatccagcacaatctgcgcggcagtattctcctccaccttttgcgggtcgagcgtacctgggtcgctatgattgttgtaacgaaagacttgttgcggggcgagcggtgtgttggcgggaacgtcagcagcgtagagaggagccgcacttaccaggctgaccagccataataaatttcgcgtatacatggtattccttaccggagaaattataagcccaacaacaatacgcctgtggcattgttcgctcaaacttatcgcgagtgatttggctcacactccggtaaagaaaaaagcgagttgcccccgcttttccattaattaacggatttcattcaatagttctggatgcttatccagaacacgtaaaagtttgattgtggaaggatgaggttgggcattgcctttttcgtaacgcgaaaacgcatttacacctcccccaaaaatttcgcttgcctctttttgggtaagagagagcttttttcgaaccttcactataaattcaggtgccactgtttcggcattcaccgaagcccgaaatgcctttacttgcgccatgaaagcatctgactcttctttattcatgatgctctcttcgcaatggacacaatataaaccgtggatacctttcaatactgtttttcgtccacggaaggtgtatggaatatctttaatgccagaaaccatttctccctggtggcaaaccggacatttcatattacttctccttaaacgagacgatcagtacgtcatgaattaccgtaattttaagataaacctggcctgtaacaagcctgggtctgtaaacatcctgccagatagtatgatcagagtaggtggtcatgcttttataaaagtcgctctctgataatccaatgataacattacacataccatcaaaatccaaacctaactcatctgcatttaacagggcactacgtgttgtacgaacttgcccggcattgacaagttttttaacctgactcaaacgtgtatgtggtgtgcgtttttccataacccccgcctccctgttactttagttataacctaaaaggttaattacagcaatgaaaaagcacctaaaaggttagttagatgtacggagatagtgaccacacaaaacgtattctttaaggaaagtgattgaccatataagaaagtggcgcattagtagcgccagtttgaagcaggaatttataagggaagctggagtcaggcatcacgccaacggcacataaacatccgtttccagtcgctgctctgtcaccccttcggcaagattggtgtagtgaaacagaatcggtgctttacgcattttctcgccgcttgcaggcagccagtggcgaatgatgccccataccgtgtgtgaaatatcgtccagctcgccaacgtggcgggccacggcataacgtccaccggtaagttcaccattgctcacaccataacgattatcgggaatcggttcgctaacgctgccgcagatatcaaagcgaaacgcttccggtgcggtggtggcagggtcgtcccaggcgacgccaaaagtctggctttggttaacaggagaaagccccgtctctttacgccacatgataaatttcgccacgctgtagttgagcaattcagggctacagcggtgcggcaacatcgccacaggtattgatgggaaatcgataatgtttacatccagtgtcaggtttgtcattttgcctccctgcgaaattattcccgggaacgcgtcccgggagcggtaacaattacggatttactttgcggatctgtttgacgtcaatttcaacagaattccagtctttatcgacttcaccctgaatctcaaccgtatctttcggcgtcaccgtcacgccgttccagcgtttgtggtcgatatcaacattgatagtaccgctggcatctttgaacacgtagagatcgtcagagatgcgttcaacgatattgccgcgcagggttacccaggtgtcgtcacgcagggattttgcgctttctacagtcgttacgctgccgttcggcccctggaatcctccggcctgactttgcgttgccgatgggccagaaaaaccgccctgctctgctgccatcaccggtgcgctgcacagggccattactgcgattactgctgcgaattttttcatgtttattactccctttaatgtctgtttccgagcatttaacaagatagtccttaacaacttcttaagggaaaaaaataaaatttagtgctgtacagagcgcgttacaacacggttcactggcagcaaatacggttatcgcagggatgaaaaaatgcgaattttactgatagaagatgacatgctgattggcgacggcatcaaaacgggccttagtaaaatgggttttagcgtcgactggtttacacaaggtcgtcagggaaaagaggcgctttatagcgcaccttatgatgcggtgatcctggatttaaccttaccaggcatggatggtcgcgatattttgcgcgaatggcgagaaaaaggtcagcgtgagccggtactgatcctgaccgcgcgcgatgcgctggcggaacgtgtagaagggctgcgtctgggagctgacgattatctgtgtaaaccttttgcgttgatagaagtcgccgccaggctggaagctctgatgcgccgaaccaacggccaggccagcaacgagctgcgccacggtaacgtcatgctcgaccccggcaaacgtatcgccacgctggctggcgaacccttaacactgaaaccaaaagaatttgccctgctggaattactgatgcgtaacgctggtcgggtactgccgcgcaaactgattgaagagaaactgtatacctgggacgaagaggtcaccagtaatgccgttgaagtgcatgtgcatcatctgcgacgcaaactcggtagtgattttattcgtaccgtgcatggtattggttacacattaggtgagaaatgaaatttacccaacgtcttagtctgcgcgtcaggctgacgctaatctttttaattctggcctcggtgacctggctgctttccagctttgtcgcctggaaacaaacaacggataacgtcgatgaattgttcgacacccaactgatgctgtttgccaagcggttaagtacgctcgatctcaacgaaatcaacgcggcggatcgcatggcacagacgccaaatagattaaaacacggtcatgttgatgacgatgcgctgacctttgccatctttacccacgacggcagaatggtccttaatgatggcgataacggagaagatattccctatagctatcaacgggaaggttttgctgacgggcaactggtcggtgaagacgatccttggcgttttgtctggatgacctcacctgatggcaaatatcgcatcgttgttggccaggaatgggaataccgtgaagacatggcgctggcgattgttgccgggcaattgatcccgtggctggtcgcactgccgattatgttaatcatcatgatggtactactgggtcgtgaactcgcgccgctgaacaaactggcgctggcactacgtatgcgtgaccctgactcggaaaaaccactaaacgcgactggcgtacccagcgaagtgcggccactggttgagtcgctaaatcaactgttcgcccgcacacatgcgatgatggttcgtgaacgacgctttacctccgacgcagctcacgaacttcgtagcccgttaacggcgctgaaagtgcaaaccgaagttgcgcagctctctgacgatgatccgcaggcgcggaaaaaagcactgctccaattacattccgggatcgatcgcgctactcgtctggttgatcaactgctcacgctatcgcggctggactcactggataaccttcaggacgtcgcggagatcccgcttgaagatctcctgcaatcgtcggtgatggatatttaccacacggcgcagcaggcgaaaattgacgtgcgactgacactcaatgcccacagcatcaaacgcaccgggcaaccgctattgctaagtttgttggtgcgaaatttgctggataacgccgtgcgctacagtccacagggcagcgtggtagacgtcacgctgaatgctgataatttcatcgtgagggataacggccccggtgtgacaccagaggcactggcgcgaattggcgaacgcttctatcgcccacccggacaaaccgctaccggcagcgggcttgggctatcgattgtccagcgaatcgccaaattgcatggcatgaatgttgaatttgggaatgcggaacaaggtggatttgaggcgaaggtaagctggtaacttctctgtctatgagagccgttaaaacgactctcatagattttactaatagcaaaatataaaccgtccccaaaaaagccaccaaccacaaaccagacaaataccgagcgagaatacatatacccaaaactcgaacatttcccgcataaagagttttcttaagataagaataataagtggcgtaagaagaaaaaatgctgcaatcattgcttgcaatatacgatcttcgcctgaaacggaaggtatactgcaaatatttcctcccgactcaagcatccagtcatacttattgaaagcaaaaaaagaatctattaaccaataagtaagcattatatatagcaatgcttcaaatattgttttaattttctgctttaacatatatcagtacgctcataaaaatccatttataattatcaacatgacacgttgatactttcatcttttacttattcaaagccatattttcaatccccaaaaaaaccgaaccaaacgtgtaaattattccggtgcgagtaagaattatgaggaatggctatcagtattgtcattttcagaaaatatttatcctgcatcggtgagtcagagtaagatcagacttttgctaaattcgcaaaagactttgcacattttgctaatttcaccgtaccgctctgtgacgtactatagtcggcaaacgtctcaccttgaggttaaaaaatgagcaacatcctgattatcaacggcgcgaaaaaattcgcccactccaatggtcaactgaacgacaccctgaccgaagtcgcggatggcacactgcgcgaccttgggcatgatgtccgcatcgttcgcgccgacagcgactacgatgtcaaagcggaagtacaaaactttctctgggctgatgtggtgatctggcagatgccaggctggtggatgggcgcgccgtggacagtgaaaaaatacattgatgatgtattcaccgaaggtcacgggacgctgtatgccagcgatggtcgtacccgcaaagatccgtcgaaaaaatacggttccggcggcctggtacagggcaaaaaatatatgctttctctgacctggaacgcaccaatggaagccttcaccgaaaaagatcagttcttccacggcgttggcgttgacggtgtgtatctgccgttccataaagcaaaccaattcctcggtatggaaccgctgccgacatttatcgctaatgacgtgataaaaatgcctgatgttccccgctatactgaagaatatcgcaagcatcttgtggaaatttttggttaactagagctcaggctttagaaggagttaaccatgcttaccgtaatcgcagaaatccgtactcgtcctggtcaacatcaccgtcaggcggtattggatcagtttgctaaaatcgttccaaccgtactgaaagaagaaggttgccacggctatgcgccaatggtggattgcgcagctggcgtgagtttccagtctatggcaccggattctatcgtgatgattgagcagtgggaaagcatcgcgcatcttgaagcgcatctgcaaaccccgcacatgaaggcgtatagcgaagccgtaaaaggtgacgtgctggagatgaatatccgtattctgcagccagggatttaatcctgccttgtttgcccggccatcctgaccgggcaatgttctttcctttaaacctcaatctccgccatgtcgcctttctcttgcaaccagttgcggcgatcttccgagcgtttcttcgccagcagcatatccatcatcgcgtcagtacgctgatcgtcttcatcatcgatagtcaactgcaccagacggcgagtgttcggatcaagcgtggtttcgcgcaattgcatcgggttcatttcccccagacctttaaaacgctggacgttcggcttgcctttcttgcgttttaattgctcaagtacgccctctttctcttcttccgtcagcgcgtaataaacctctttcccgagatcaatacggtagagcggtggcagtgcgacgtaaacgtgaccgtgtttcaccaacgcgcggaaatgttttacgaacaaagcgcagagcagcgtggcaatgtgcagaccatcagagtccgcatccgcgaggatacagattttgccataacgaagctggctcagatcgtcgctgtcaggatcgataccgatcgctaccgaaatatcgtgcacttcctgcgaagccagcacttcgtcggaagagacttcccaggtgttaaggatcttacctttcagtggcatgatcgcctgatattcgcgatcgcgcgcctgcttggcagatccgcctgcggagtcaccttccacaaggaacagctcggtacggttaaggtcctgcgcggtacaatcagccagtttgccaggcaacgccgggccgctggtcagctttttacgcaccacttttttggccgcacgcatacggcgctgggcgctggaaatcgccatctccgccagcagttcagccgcctgaacgttctggttcagccacaggataaaggcatctttcaccacgccagaaacgaatgccgcgcattgacgcgaagagagacgctctttcgtctgcccggcaaactgcggatcctgcatttttactgacagcacataggcgcagcgatcccagatatcttccgccgacagctttacaccgcgcggcagaatattgcggtattcacagaactcacgcatcgcgtccaacaggccctgacgcagaccattaacatgggtaccgccctgcatcgttgggataaggttgacgtagctttcggtcagcagttcaccgccttccggcagccacagtagcgcccagtccacagcttcagtatcaccagcgaaattaccgataaacggtttttccggcagcgtcggcagaccatttaccgcttccgccaggtaatcattcagaccgtcctgatagcaccagcgttgttcggtattgttgatctcatctttaaaagtgatctcaacgccagggcacaataccgctttggctttcagcacatgcgtcaggcgtgaaacagaaaatcgcgggctgtcaaagaaggtttcatccggccagaagtgcacactggtaccagtattgcgtttaccgcaagtgccgacaacctgtaaatcctgcaccttttcgccattttcaaaggcgatgttataaacctgaccatcgcggcgcacgttaacttctacgcgcttcgacagggcgttaaccaccgaaatccccacgccatgcaggccgccagagaactggtaatttttgttagagaatttaccgcctgcatgcagacggcaaagaatcagttcaaccgccggtacaccctcttccgggtgaatatccaccggcatcccgcgcccatcgtcaataacttctaacgactggtcagcatgtaaaataacgtccacgcgttttgcgtgacccgccagtgcttcatccacactgttatcaatgacttcttgccccaaatggttagggcgagtggtatcggtatacatccccggacggcggcgaaccggctcaagcccggtgagtacctcaatggcatcagcgttataagtttgcgtcatggtttaagttagtaattcgagttgatcgtcagagatggtgcagaccaagaaaatcgacgatcgggttgaaataatcttcgaagcccgtgaatgcgtggttgccgccttctatgacagtctggcggcaggaagcgtagtacgccaccgcctggcggtaatccagcacttcatctcccgtctgttgcagcagccagatcaaatccggcgcttccagcgggtcaatctgcatgactttaagatcgtaaatatggcgtgactctagcacatattgctgcccggtgtaggggttctcgttctgaccgagatagtccgtcagcagttcaaacgggcgcaccgccgggtttaccaccactgcgggcagcataaaacattgtgacaaccaggtggcgtaatatccccccagtgacgaaccgacaatacccagcgaatcaccgccatgttccaggacaatggattccagcagctctgccgcgtcggaaggatacggcggcaactgcggaatgatcatctcaacgtcagggtgatgttccgccagccagttttttaacaagctcgcttttgcagagcgcggcgagctgttgaaaccgtgtaaataaagaagcgtagacatcagtagccttctgaagcggtatcaggttggaaacgtgtgtccgccaggcgatgcacctcggtggtcagcgtgccatcagcatgtaactcgagagtacgccagccgggcgcgatggtatccagcgtaaagttggaacagtgcggcttaaactgcacacaggtcgacggcgttgccagcaggcggcgaccattccagtcgagatccagctcctgatgaatatgaccgcacagcaagtatttgacgtgcggaaacttcgccagcacggtatccagttcgcccgcgttacgcagactgtgttgatcgagccaactacaacccgcaggtagcggatgatgatgcagcagcagcaacgtatggcgttctggcgcatcggccagtttacgttccagccactcaagctgaaactcgctcagctcaccgtgcggcacgccaaacacctggctatccagcaacaggatttgccattgctcaccaataaacacgcgcttcgccggggagatacccgcatcctgtaacgcgctgtacatcgcgggctggaaatcgtggttgcccggcagccagacgcagggcgcacgaaaacttgcgatgccttcagcgaaatgctgataggccgcagaggattgatcctgcgctaaatcacctgtcgcgacaatcaggtcgaattcgtgctggtgtggccgaatcgcctccagcaccgcctggtaactctcccaggtgtttacccctaacagggcttcgtgcttttgtgcaaacaggtgagtgtcggtaatttgtaaaatcctgactctggcctcaccagccagaggaagggttaacaggctttccaaatggtgtccttaggtttcacgacgctaataaaccggaatcgccatcgctccatgtgctaaacagtatcgcaaccagtccgctaaaaactgattaatttgatgcttttcgtcgcgttgatgcaactttttattaggataatcataccgcgctttgaagcgaaaaatctgctggcttgaacacacttcagccaccatcgcgtcatgatacagacgcaccgtcattgacggaaggctccagtaactgatcgcgggcgcagtctgttctattgtcaccagggtagtgtatcgggtcgattccacaatcgtcagccgatattgtgcgtttgccacctgatagcttacagtttcgccgggtgcgtcattgcgcggtaacaaacggcgcaattgtgaaaagttcatctcgcacaggcgcatcatttcaggaaagtcaggtgtgtaacgcttcatttatgcccactcattttttaacgcttgatgatgcagctgcagccattgcaaagcgatgaccgacgctgcgttgtcgattttcccctcttctacccactggtatgcctgttcccggcttaccacatgaacgcgaatatcttcgttttcatcagccagaccgtgaataccgcttgcggtcgtggcgtccacttcgcccaccataattgacgaacgctcactggtgccccccgggcttgccaggaaacttaacaccggtttggtccgtttgactatcagtcccgcctcttcaatcgcttcgcgacgggcaacatcttccacactttcaccctcttcaatcatcccggcaaccatctccagtagccaaggggtttcgctggtgtcgtacgcggcaatccgaatctgctcaatcagcacaacttcatcacgcactgggtcaaagggtagcaagactgcggcgtgaccgcgctcaaaaatttcccgccgcacctcatgactcatttgcccgttgaatagacgatgacgaaatctataaagatctaatgaaaaaaagccgcgataaagtgtttctcgtgcaataatttctacatcgtttttgccaaatgtaacgggcaggttgtctggcttaagcattgttaatgtcctggcactaatagtgaattaaatgtgaatttcagcgacgtttgactgccgtttgagcagtcatgtgttaaattgaggcacattaacgccctatggcacgtaacgccaaccttttgcggtagcggcttctgctagaatccgcaataattttacagtttgatcgcgctaaatactgcttcaccacaaggaatgcaaatgaagaaattgctccccattcttatcggcctgagcctttctgggttcagttcgttgagccaggccgagaacctgatgcaagtttatcagcaagcacgccttagtaacccggaattgcgtaagtctgccgccgatcgtgatgctgcctttgaaaaaattaatgaagcgcgcagtccattactgccacagctaggtttaggtgcagattacacctatagcaacggctaccgcgacgcgaacggcatcaactctaacgcgaccagtgcgtccttgcagttaactcaatccatttttgatatgtcgaaatggcgtgcgttaacgctgcaggaaaaagcagcagggattcaggacgtcacgtatcagaccgatcagcaaaccttgatcctcaacaccgcgaccgcttatttcaacgtgttgaatgctattgacgttctttcctatacacaggcacaaaaagaagcgatctaccgtcaattagatcaaaccacccaacgttttaacgtgggcctggtagcgatcaccgacgtgcagaacgcccgcgcacagtacgataccgtgctggcgaacgaagtgaccgcacgtaataaccttgataacgcggtagagcagctgcgccagatcaccggtaactactatccggaactggctgcgctgaatgtcgaaaactttaaaaccgacaaaccacagccggttaacgcgctgctgaaagaagccgaaaaacgcaacctgtcgctgttacaggcacgcttgagccaggacctggcgcgcgagcaaattcgccaggcgcaggatggtcacttaccgactctggatttaacggcttctaccgggatttctgacacctcttatagcggttcgaaaacccgtggtgccgctggtacccagtatgacgatagcaatatgggccagaacaaagttggcctgagcttctcgctgccgatttatcagggcggaatggttaactcgcaggtgaaacaggcacagtacaactttgtcggtgccagcgagcaactggaaagtgcccatcgtagcgtcgtgcagaccgtgcgttcctccttcaacaacattaatgcatctatcagtagcattaacgcctacaaacaagccgtagtttccgctcaaagctcattagacgcgatggaagcgggctactcggtcggtacgcgtaccattgttgatgtgttggatgcgaccaccacgttgtacaacgccaagcaagagctggcgaatgcgcgttataactacctgattaatcagctgaatattaagtcagctctgggtacgttgaacgagcaggatctgctggcactgaacaatgcgctgagcaaaccggtttccactaatccggaaaacgttgcaccgcaaacgccggaacagaatgctattgctgatggttatgcgcctgatagcccggcaccagtcgttcagcaaacatccgcacgcactaccaccagtaacggtcataaccctttccgtaactgatgacgacgacggggcttcggccccgtctgaacgtaaggcaacgtaaagatacgggttatctgccgcattcttcccccttctcgcttcaatttcgaccagccatcctctattctgatgggtatttaccactggtcccggaagacaaaaatgaaacggacaaaatccatacgccacgcatcgttccgcaaaaactggagcgcacgccatctgacaccagtcgctctcgcggttgccactgtttttatgctggctggctgtgaaaagagtgatgaaacagtgtctctctatcaaaatgctgacgactgttcagctgcaaacccaggcaaaagcgccgaatgtaccaccgcgtacaacaatgcgctgaaagaagccgaacgtactgcgccgaaatacgccacccgtgaagactgtgttgctgaatttggtgaaggtcagtgccagcaggcaccagcccaggctggcatggcaccagaaaaccaggcgcaggcccagcaatccagcgggagtttctggatgccgctgatggccggttacatgatggggcgtctgatgggcggcggcgcgggatttgcacagcagccgctgttctcctcgaaaaacccagccagtccggcttacggtaaatataccgacgcgacgggtaaaaactatggcgcagcccagccaggccgcaccatgaccgtaccgaagacggcaatggcaccaaaaccggcgaccaccactaccgttacccgtggcggttttggtgaatctgttgccaaacaaagcactatgcagcgtagtgcaaccggtacctcttctcgttcaatgggtggctgataccgatggaaagagtcagtattaccgagcgcccggactggcgtgagaaagcccacgaatacggtttcaattttcacaccatgtacggcgagccgtactggtgtgaagatgcttactacaagttgaccctcgcccaggttgaaaagctggaagaagtcaccgccgaactgcaccagatgtgcctgaaagtggtggaaaaagtgatcgccagcgatgagctgatgaccaaattccgcattccaaaacacacctggagttttgtgcgccagtcatggctgacgcaccagccatcgctttattcgcgtcttgatctggcgtgggatggcactggtgaacctaaacttctggaaaataacgccgatacgccaacgtcactatacgaggcggcgttctttcagtggatctggctggaagatcagcttaacgccggtaacttgccggagggcagcgaccagtttaacagtctgcaagaaaaactgatcgatcgcttcgttgagctgcgtgaacagtatggcttccagttgctgcatctcacctgctgtcgcgacacggtggaagatcgcggaaccattcagtatttgcaggactgcgcaacggaagctgaaattgctactgagttcctctacatcgatgatatcgggttaggtgaaaaaggtcagttcacggatttacaggatcaggtaatttccaacctgttcaaactgtatccgtgggaatttatgttgcgtgagatgttctcaaccaagctggaggatgcaggcgtacgctggctggaaccggcgtggaagagcattatctccaacaaggcacttctaccgctactgtgggagatgttcccgaatcacccgaacctgctgcccgcttattttgcggaagatgatcatccgcaaatggaaaaatatgtggttaaaccgatcttctcccgtgaaggcgcaaacgtgtcgatcattgagaacggcaaaaccattgaagcagcggaaggtccgtatggcgaagaagggatgattgttcagcaattccacccgttaccgaaattcggcgacagctatatgctgattggtagctggctggtgaacgatcaacccgccggaattggcattcgtgaagaccgtgcattgatcacccaggatatgtctcggttttatccacatatttttgttgaataagccacgataccggatggcactcgccatccggtaattgttagcctatctgcaccgacagcatactcaggctgcccatttctataccctcaaccggaatggtaattggctcctgcccatcccacgcacctaacacatacaacaacggcaaataatgctctggcgttgggttcgataacgtgccaccttcatggtcgaggtaattcaccagaggatgttgttccactggcccttgccacgtcagattcgctttcacatactcattaaacgacgtcgcccacggatacggtgaactatcaccgtgccacttcactgtgcgcaggttatgcaccacgttaccgctggcgaccaacattattccttcatctcgcagcgctgccagtttgcgccccatttcgaaatgccaggcggcaggtttgctactgtcgatactcaactgcaccatcgggatatcagcgtcaggatacatcttaatcagcacgccccacgagccgtggtcaaagccccaggcttctttatccagcgtcaccgggatcggcgctaacagctcaaccagacgctgtgccagcgcaggcgaacccggagcaggataatgcgtatcgtacagcgcctgcgggaagccaccaaagtcatgaatcgtgggcggcgtctccatcgcggtcactcctgttccacgggtaaaccagtgagccgaaaccaccacaatcgcttgcgggcgtggcaatgtcatccccaacttctgccagctgcgggtatacaaattatcttccagcacgttcatcggactaccgtgacctaaaaacaatgctggcatacgtgttgaagacatgatgatatccttaactaaaggtgtcattttgatatcctcacaatacgcttgttcggcggagtaagaacccggataacaatgatgatgatcatcagttattttgacgatctgcctgaaggtgaagatttataaggagttgtcgatgtcagtacctctcattctgaccatactggcgggggcagccacgtttattggcgcgtttctcggcgttctcgggcaaaaaccctcgaaccgcttactggcgttttcgctaggttttgcggcggggatcatgttgctcatctcattaatggaaatgcttcctgccgcactagcagctgaaggaatgtcgcctgtgttgggttatggaatgtttatcttcggtctgcttggctattttggcctggaccgcatgttgccacatgctcatccgcaggatttaatgcaaaaatcggtgcagccgttgccaaaatcgatcaagcgcacagccattctgctcactctcggcatcagtctgcataacttcccggaagggattgccacctttgtcacggcgagcagcaacctggagctgggatttggcatcgcactggccgtcgcgttgcacaatatccctgaaggtctggcagtggcaggcccggtttatgcggcaacggggtctaaacgcaccgcgattctgtgggcggggatttctggactagcagaaattcttggtggtgtgctggcgtggttaatcctcggtagcatgatttccccggtggtcatggcggcaatcatggcggcggttgcaggaattatggtggcgctctcggttgatgaattaatgccgctcgccaaagagattgaccctaataataaccccagctatggcgtactatgtggaatgtcagtgatgggattcagtttagtgctgctacaaacggcgggaattggttaaaaacaacatcagaagttgtccagcgcatggacaacttctgccagcttcacgaaagccttattctaccttttcggctgtctcttctctcgtactgtttaagtatttgttccgcgcttcaagcagtgcgtctctgtcctggcgaaacgcccgacaataacgtttcaaatgcaggaaataacccaccacaaccagagcaatcaatacaatccagtaccaggcgataaacatccttttacccttaatatttaacaatactaaacatttagcgtataaatttcacatatcctttttcggatatattcatatggtcgcataataacggaacaattatatgattttgatcataatgaaaaagaatgcctgatattaatgaaattttctcatagaaagagaagcggaattaacatcttgcatagcagggaaaaataaaaaccgaagcctgctacaacttcggtttcttgattaaggcagtaaattaagcagcggttttcagctggctttacgctcatgtgcctgacggtatgccaccaggtcttcaatagtcacgagcgccatattgtgtttattggcaaactcaatacactctggtgcacgcgccatcgtgccatcgtcattagtcagctcacacagtacaccagccggtttaaagcctgccagcgtcatcagatcaatagttgcttcagtatgaccgccacgcgtcagtacaccacctgcctgagcgcgaagtgggaaaacgtggccaggacgattcagatctgacggttttgcgccatcggcaatcgctgcgcgaacggtcgtaatacggtcagcggcagaaacaccggtagtcacaccttcagctgcttcaatggtcacggtaaaaccggtgccataggcgctggtgttattttctaccatcattggcagatcgagttgtttacggcgatcttcagtaatgcacaggcaaacaataccgctaccgtggcgaatggtcagcgccatctgctcaacagtcatggtttctgccgggaagatcatatcaccttcgttttcacggtcttcatcatcaagcaccattacaccgcgtccttcacgcagcgcagccagtgcattttcaacacgttcgaaaggcgtaccaaaagaggaaagtagcgtctgattcatggtaaaaaaacctcactaaaattatggttaccagaatcagggcagtcttaggagtggcggcatatagccaaaataacgtgagcgggtccatgcccgacagaatcgttactctctcccatccggactctaaccgtcggccccggaattacaccggatctgctgtcctttgagttcgcacccaaagcgctcgcgggctttcaactgagttgatttaccgccggtggggaatttcgccccgccctgagaataagcggattcactataacgctaatgattagcggcagcaacgcatagcttcacataattctggtttatgacttacccttatcgcactacaatggcactcaacacctatcagtacagggaaactacaatgattgacccgaaaaaaattgagcaaatcgctcgccaggttcacgaatcaatgcctaaaggaatcagggagttcggggaagatgtggagaaaaaaatccgccaaaccctacaagcgcagctgacgcgcctcgaccttgtaagccgtgaagagttcgacgtccaaacgcaagtcctgttacggactcgtgaaaaactggcgctgcttgaacaaagaatcagcgaactggaaaatcgcagtactgagatcaaaaagcagccagatccagagactctccccccaacgctgtaaacattcgtctttaatgcactgtaaattatgaattaatcctctaatttatagtgctttctattaccttatcgcgtaatcccattcagaaaaccatcacaaaaatgaatgagtacaattgaaagtataattgcaatgtattttttaagttttacttaatcgatatttagataaactaattttataaaaaacacaaaataaaatatcatatttcaatgattagtagtccttaaataacagttactaatcattctcttttctacttatctttatataaaggaatattatgtccgcttttaaaaagtcacttcttgttgctggcgtagcaatgattctttccaataacgtgtttgctgatgaaggtcacggtattgttaaatttaaaggtgaagttatctctgctccatgttctattaaaccaggtgacgaagatttaactgtaaatctgggtgaagtagcagataccgtactgaaaagcgatcagaaatctttggctgaacctttcactattcacctgcaggactgcatgctgagtcagggtggaactacttattcaaaagcgaaggttactttcactacagcaaataccatgacgggtcagtctgatcttctgaaaaataccaaagaaactgaaatcggcggcgccactggcgttggcgtacgtattctggacagccagagcggcgaagtaactttaggtactccggtagtaattacgttcaacaataccaacagctatcaggaactgaatttcaaagctcgtatggaatccccaagcaaagatgccaccccgggcaacgtttacgctcaggctgactacaagattgcttacgagtaatcgcatttggccgggttcgcccggccacatcattaacggattaatgataagtggatcagatgtataaaaaattaaaattaaccacaataagcgaattgattaaaaatatttattgttcattatccgttatcatcattggttgtgcgtcagcttatgccgttgaattcaacaaagatttaatcgaagccgaagatcgtgaaaacgttaacctttcccaatttgaaactgatggccaattacccgtcggcaaatattcactaagtactctgattaataataagaggacgccaatccaccttgacctccaatgggtattaattgataaccaaactgcagtttgcgtgacaccagagcaattaacattattaggatttactgatgaatttattgaaaaaactcagcaaaacctgatcgatggttgttaccctatcgaaaaagaaaaacaaattacaacttatctcgataaagggaaaatgcaattatccatatctgcacctcaggcatggttaaaatacaaagatgcaaactggacgcctcctgaactttggaatcatggtattgctggggcatttcttgactacaatttatatgcctctcattatgcaccacatcagggcgataattcgcaaaatataagttcctatgggcaggctggggttaatcttggggcctggcgcctgcgtactgattaccagtacgatcagtcatttaacaatggcaaaagccaggcgaccaacctggattttccgcgtatttatttgtttcgcccaatcccagcaatgaatgcaaaactaactataggtcaatacgatactgaatcctctattttcgactctttccatttttctggcatttcgttgaaaagcgatgagaatatgttaccgccagacctacgtggttacgcaccgcaaatcacgggtgtcgcacaaacgaatgcaaaggtcactgtctcacagaacaaccgtattatttatcaagaaaatgttcctccaggcccatttgctattaccaatttattcaatacattacaggggcaacttgacgtcaaggttgaagaagaggacggacgcgttacgcaatggcaagttgcatctaatagtattccttatctgacgcgtaaagggcagattcgctacaccactgctatgggtaaaccgaccagcgttggtggtgattccttacaacaacccttcttctggactggtgaattctcatggggttggctgaacaatgtatccctgtatggtggttcagttttaacaaaccgtgattatcaatctctggctgccggcgttggttttaaccttaactcattaggttcattatcttttgatgtcacacgatctgatgctcagttgcataatcaggataaagaaacgggttatagctaccgcgctaactattcaaaacgttttgaatctaccggtagccagctcactttcgctggttaccgtttctctgataaaaactttgtgacaatgaatgaatatatcaatgacactaaccattacacgaattatcagaatgaaaaagagagttatattgtcacgtttaaccagtatcttgaatcattaaggttaaatacatacgtaagtttggctcgtaatacttactgggacgccagcagtaatgtgaattattcattatcacttagccgcgattttgatatcgggccattaaaaaacgtctccacttctctaacatttagccgaataaactgggaagaagacaaccaggatcaactgtacctaaatatttcgattccctggggaactagtagaacattgagctatggtatgcaacgaaatcaggataatgagatttcgcatactgcttcgtggtatgactcttccgatcgaaataattcctggagcgtttctgcttcaggcgacaatgatgaattcaaagatatgaaagcgtcactacgcgccagttatcagcataataccgagaacggtcgactctacctctccggtacatcacagcgagacagttattattctctgaatgccagttggaatggttcattcactgcgactcgccacggtgccgctttccacgactatagcggtagtgctgactcgcgttttatgatcgacgcagacggcactgaagatattccgttgaacaataaacgcgcggtaactaatcggtatggcatcggagttattccatcagtcagcagttacataacaacatcattaagtgttgatacccgaaatctgccagaaaatgtggatatcgaaaactcggttatcaccaccaccttaaccgagggtgctattggctacgccaaacttgatacccgcaagggctaccaaatcataggggttattcgcctggcagatggtagtcatccaccactggggattagcgtaaaagatgaaaccagccacaaagaattaggactggttgctgatggcggctttgtatacctcaacggcattcaggatgataacaaacttgctttacgctggggtgacaaatcttgttttattcaaccacccaatagcagcaacttaaccaccggaacggctattttaccgtgtattagccaaaattaattcaggatgaaactaatgcgctacttaaatacaaagaatatcattgcagcaggagtattactctcctgtatgagcagcattgcctggggtgccatcatcccggatcgtacccgtatcataatgaatgagtcagataaaggcgaagcattaaaacttactaatcaaagtaaaaacctgccctatctggcccaaacatggatagaagatacgaaaggcaataaatcgcgtgactttattgtcactgttcctccaatggtgcgtttaaatcccagtgagcaaattcaaataagaatgataactcaggaaaaaattgctcaacttcctaaagacagagaaacgctcttctattttaacgtgcgagaaataccgcccaaaacagataaaaaaaatgtgatgcaagtcactatgcagcacgcattgaaactattctggcggccaaaagccattgaattagaagacgatggggtaatgacttacgaaaaagttgaaatcattcgtagaaatgacggttcgatccgctttaacaataagatgccttatcacgttacgctgggttatatcggaacaaatggggtaacgatgttaccacaaacgcaaagcttaatggtaaccccttttagctatgcaaatacgcagtttaaaaatgttccgtcaacttttcaggtgggttatatcaatgactttggtggattaagtttttatgaaataaactgccctgtagtaaataacatttgtaatatttctgtagccaaccgagatcaataatatgcgctacttgttaattgttattactttttttatgggttttagttcattacctgcatgggcaatggactgctatgctgaacatgaaggtggaaataccgttgtcattggttacgtaccaagaatctctatccccagcgatggtaaaaaaggtgataaaatctggcaaagcagtgaatattttatgaatgttttctgtaataatgcactaccaggcccatctccaggagaagaatacccatctgcatgggcaaatataatgatgttgttagcatcaggtcaagacttttataatcaaaactcttatactttcggtgtaacttataatggggttgattatgattctacatctccactacctattgcagcacctgtatgtattgatataaaaggagccggaaccttcgggaatggctacaaaaagcccgcagtctgtagtggcggtcctgaaccgcaattatcagtaacttttccagtacgagtgcagctatatattaagctagctaaaaatgccaataaagtaaataaaaaacttgtattacctgacgaatatatagcacttgaatttaaaggtatgagcggagcaggtgctatagaagtagataaaaatctgaccttcaggattcgcggattaaataacattcatgtccttgactgctttgttaatgttgatctggaaccagctgatggcgttgtcgactttggtaaaataaattcccgaacaattaaaaataccagcgtgagtgagacgtttagcgtagtcatgaccaaagatccgggtgcggcctgtactgagcagtttaatattttagggagttttttcactacggatattttgagtgattatagccatctggatataggtaatggtctgctattgaagatatttcataacgatggaacagcaacggaatttaaccgcttctcacaatttgcttctttttcatcgtctagtgcgccttcggtcaccgcaccattcagggcagaactgagtgcgaacccggcagaaacggttgttgagggaccgtttagtaaagacgtaatcctgaaaatcacctataactagtatctaatacaaacactaaaacgggccatcaggcccgttatatcagtgctctaactccagctctcttgcctgcatcatctgttgacaataccaggcataacgtgcgcaaaaccaggttctatgttcttcatccatgttaccagtaacggccagaatatcgaccgggcgaccttctgcgtgcattctggcaaaactacgcgccaggaaatcgaaattatttaaagaattaagactatgatccataagcacatcctccggttatcgcataccttttaaggccatatgctttttctgatttcagtattccccaatcagtgtagtgcctttaaacataacgtgcgtaaatatattgtccccgatcacactttttagtgaaaaataaaaaaccatattaaaagactttctcttccagaacttctctaacctgtgttattattaacacagataaatgtaagcaaggaaactattacaaagtaaatattgcgtcactaaatggacattggagtgatatatgattttattcgccgactataacaccccttatcttttcgctatttcctttgtactgttgatcggcctgttagaaatttttgcgcttatctgcggtcacatgctctccggtgctcttgatgcacatcttgaccattatgattctataaccacaggtcatattagccaggcacttcattatctcaatattggaagattgccagctctcgtcgttctctgcttactggctggtttttttggtcttattggcatcctgttgcagcatgcctgcatcatggtctggcaatcaccactgtcgaacctgttcgtggttcctgtcagtttactgtttacgattattgcggtgcattataccggtaaaatagttgcgccctggattccacgcgaccatagttcagctattacagaagaagaatatattggtagcatggcgttaattaccggtcatcaagccacttcaggtaatccctgcgaaggaaaactcaccgatcaatttggccaaatacattatttactactggagcctgaagaaggaaaaattttcactaaaggagacaaagtgttaattatttgccgactttctgcaacgcgatatttggcggaaaataatccctggccccaaatattgtaatttattaatcaaaaggaaatttaataatggatgatattgttaattctgtgccctcctggatgtttaccgcaattattgccgtatgcattctgtttattattggaattattttcgccaggctctatcgtcgcgcttcggcagagcaagcttttgttcgtactggtttaggtgggcaaaaagtggtaatgagcggtggcgcaatcgtgatgccgatctttcatgaaataatccccatcaatatgaatactctgaagctggaagtcagccgctcaaccattgatagcctgattacgaaagatcgtatgcgcgtcgatgtagtagtcgctttctttgtgcgggtaaaaccttcagtagaagggattgccaccgctgcccagacgctggggcaacgcaccctgtcgcctgaagacttacgtatgttggttgaagataaatttgtcgatgccctccgtgcaacagctgcgcaaatgaccatgcatgagttacaggatacccgcgagaactttgtgcagggggtgcaaaatacagtggcagaagacctgtcgaaaaacggtctggaactggagagcgtttcacttaccaactttaaccagacctcgaaagaacatttcaatccgaacaatgcctttgacgccgaaggtttaaccaaactgactcaggaaacagagcgccgtcgccgcgaacgtaacgaagttgaacaggatgtagaagttgcggtgcgtgaaaaaaatcgcgatgcgctatcgcgcaagctggagattgaacagcaagaagcgtttatgacgcttgagcaggagcagcaggttaaaacccgtactgccgaacagaatgcacgtattgcggcttttgaagctgaacgtcgtcgtgaagcagagcagacacgaattctggctgaacgacagattcaggaaacagaaatcgaccgcgaacaggccgtccgctcaagaaaggttgaagctgaacgtgaagttcgcattaaagagatcgaacagcagcaggtcaccgaaatcgctaaccagacgaaatcgatcgctattgccgccaaatcggaacaacagtcccaggcagaagcgcgtgctaatctcgcacttgcagaagcggtaagcgcccaacaaaacgtagaaaccactcgccagactgccgaagccgatcgtgctaaacaagttgccctaatcgctgccgcgcaggatgcagaaaccaaagcggttgaactgaccgtgcgggcgaaagcagaaaaagaagccgcagagatgcaggcggcggctatcgttgagttagccgaagctacacgtaaaaagggtctggcggaagcagaagcacaacgtgcgctgaacgatgctatcaacgtactttctgatgaacaaaccagccttaaattcaaactggccttgttgcaggcgctgcctgcggtaatagagaaatccgttgagccgatgaagtcaatcgacggtatcaagattattcaggtcgatggtctgaatcgtggcggcgctgcgggtgatgcaaacacgggtaatgtggggggcggaaacctggcggaacaagcattatcagccgctctctcttaccgcacacaggcaccgctgattgactccttgctcaatgaaattggcgtttcaggcggctcactggcggcattgacttcacccttaacctcaacaactcccgtcgaagaaaaagcagagtaaaccctcttccaggaataatccctggcccaaaaagccggggattttttatatctgcgttccgctaaaaagtgcaaatgatcaggttgttgcagcattttgcgtgacggctcggggaaggcaaaactgcatcagagaaagcattgcgtggggtctggcgctcatcaacaatcggggagtcagcagggggctgaaacgggaaagcccctcccgaagaagggggccttacagaaggaaagggttatgatgaagctcgtcatcatactgattgtgttgttactcgtaagtttcgcagcttattaacagccaatcagaggggggagaaatcctccctcacccttgttcctttactttaggttgaaaaaaatcagcgtcaagaaggtttcattaacacatatccctggcccaaaaagccggggattttttatatctgcgttccgctaaaaggtgcaaatgctcaggacgttgcagcgttttgcgtgaccgctcggggaaggcaaaattgcctctgggaaagcattgcgcggggtccggcgctcatcaacaatcggggggcagcaaggggctgaaacgggaaagcccctcccgaagaaggggccttgtataaggaaagggttatgatgaagctcgtcatcatactggttgtgttgttactgttaagtttcccgacttactaacaactcatcagaggggggagaaatcctcccttacccttgttcctttactctaggttgaaaaaacaacagcgtcaataggcctgccatgtacgaagcgagatctgtgaaccgctttccggttagccttttttatcctgttggatcttcttgatgatgttggtcgtcgagcaaccgtcttcaaagttgagcaccaacacttcgccaccgttggcccagacttctttactcccggcaatctcttctggtttatagtcgccgcctttcaccagcagatctggcaagatcccggcgatcaagcgctgcggcgtgtcctcttcaaacgacactacccagtcgaccgcttccagtgcgcccagcacaatcatacgctgttcgagtgggtttaccgggcgggaatcccctttcagccgtttggtggaggcatcgctgttgacggcaacaatcaagcggtcacccagcttgcgggcatttgccagataagagacgtgcccggcgtgcaggatgtcaaagacaccgttggtcatcaccactttttcaccacgtttacgcgctgccgctacggccagcttcagttcctcttcggtcatcacgccaaagcctgtatctgcacgtccacgtacagcattttccagctcgatcggcgaaaccgtggaggttcccagtttgccgaccaccacgccagccgccgcattggcaaagaagcaggcttcttccagcgaattacccgctgccagcgttgccgccaggacgccaatcaccgtgtcgcccgcaccggtaacgtcatacacttcctgcgcttgggttggcatatgcagcggcgctttacccggttgcagcagcgacataccctgttcggaacgggtcactaacagagccgagagttcgtaatcggcaatcagtttcatgccgcgctcaacaatctcttcttcggtcttacatttaccgacaacagcttcaaattccgagagattcggcgttaacagcgtagcgccgcggtagcgctcaaaatcggtaccttttggatcaatcagcaccggaacacccgctttacgcgccagttggatcatctgctgtacgcttgccagcgcacctttggcgtagtcagaaagcaccagcgcgccaatcgaactcagcgcctgattaatccgctcgtgcagcggctgcggatcaacaccttcgaaaccttcttcaaaatccagacggatcagctgttggttgcgggaaagtacccgtaatttggtaatggtcggatgcgtcggtacagaaacgaagtcgcatttgacgttgacgtcggccagagatttactcagcgcgcgcgctgcatcgtcaatgcccgtcaacccgaccaggcgtgcattagcaccgagagaagcgatattcatcgccacgttagccgcgccgcccggacgttcttcgatggtattcactttaaccacgggcaccggcgcttccggcgagatacgactggtggggccgtaccagtaacgatccagcatcacatcaccaaccaccatcactcctgcacgttcaaactctggcagcgttactttcattcctgtctcctgagagattcaaaatttgcgcgcgataataccatacttcattcttccaccagccacttctgccagcttgcccgcaccagttcacgctctgcggtgaagcaatcctccgacacatggcccggcaattcctgtaatgccagatgatgaagttcatcgcgaagcgtagtgtaagcacgggtcagcgccatcgcttcctgctcttccataatgtcgttttgcgccagtagttccagaatacgcacgttgtctgaccagcgcgttaacttcggtttttcatgagcgtagcgcaacaccagatattgggtaataaattcgatatcggtaattcccccttcatcagctttgatatcaaagcgatcgcgatgtttattgccgagatgagcgcgcattttctcgcgcatttcccgcacttccgtttgcagagttttaccttcacgcggcagcgtcataatctcgcgacgcactgcgtcaaagtgcgcggtgagctgcggatcgccgtacactacacgcgcacgcaccagcgcctgatgttcccacgtccaggcctcgtttttctgataatcggcaaatgcttctgcggatgtcaccagcattcccgccgccccggacggacgcagtcgagcatccacttcatacaaaatgccggaagaggtacgcgtactgaacagatgcataatgcgttgcgccagacgcagataaaactgccgcccgtcgatttcccgctcaccgtcagtcatcgcatccattgggcaatcatggaggaagataaggtcaagatcggaactgtagcctaactcccagccgcccagcttgccgtagccgaccaccgcaaaaccacgcccttcgcgttcgttcaggtgattcggcttaccgtagcgggcaaccatttgaacccacgcctgctgaacgacggcatctatcatggcttccgccagccaggttaagtgatcgctcactttcatcaccggtagcgtaccggcgatatccgctgcggcgatgcgtaacagctgcgcctgtttgaactgacgcagcgcctcaagctgttgctcttcgtcatcttccggcacgcgcagcaaatactggcgcaactcatcgcggtaggcatcggtcgccgtcggctggtaaagggtgtttggatcgagcaattcatccagcaataatggataacgcgccagctggctggcaatcatcggcgacgcggcacacagagaaatcaaatgtttaagcgccgcggggaattcactgagcaattctaaataggtggtgcgggtaacaatccccaccagcaaggcggtaatgcgcgacagcgtaacggcagcgtcttcacgcgcacagacatcacttagcagatgcggcatcagatggtcgagcacctgacgtcctcgcggcccgatggtgcgcttatccagctctttgcggaaatcggcaatcagcgttagcacctgtttgcgatcatcctcgctaagatgcgccagcactggcgtagtgtcatcttcctgcaacgcatcctgccacagctcacgccactgttccgacagcgactcttcctgagtttcactttcatcgtcgccaatcaattcattaaacacccggcgcacattggtcatatgtgcggtcagcgccccggtcagttgcggccagtcagcaaagtccatcgcccacgccagccgcgcacgattaagctcatcagaaggaagcgtctgggtttgttcgtcgttaatgctttgcagcaggttttccagacgccgcaggaacagatacgccactcgcaattgttcagcatcgttttcagaaagcagatgcagctcggcaatggcgctgagcgttggcagtaaagagcgcgattgcagcgacggttcgcgtccgccgcgaatgagctggaacacctgaacgataaattcaatttcgcgaatgccgcctgcgccgagtttgatattgtcggtcaaaccacgtcgacgcacttcacgggcaatcatccctttcatgttgcgcagcgactgaatcacgctgaaatcgatgtaacgacggaaaacaaacgggcgcagcatcgcacgcaactcgttagcatagacgccttcgctatcgcccataatccgcgccttgaccatcgcgtaacgctcccagtcgcgcccctgctcctggtaataatcttccaacgcggcaaagctcagcaccagcgggccactttcgccaaacggacgcagccgcatatccacgcgatagacgaagccatcctgcgttggttgatccagcactttaatcagccgctgccccatgcgggtaaaaaactgcgcgttatccagttcccggcgtccaccctgcgtacaaccatgttccggccaggcaaaaatcagatcgatatcagaggagaaattcagctccccaccgcccagcttacccatgcctaaaatcagcagcggttgcgcttcgccctgcgcattgcacggcgttccccactcgcggcagcaggcgtcatacagccagtcacgcgccgcaacaatcagcgtctccgccagatagctgagctgctgcaatatgctctcttcagtaaccagtgccagcgtttgcgcccaggcgatgcgcaccataatgcgccgccggaatagccgcagctcgcgcattaacccggcttcgtcactcacattacagagcgcctcctgcaaccatgccgcgtaatgctgccattcgtcggcctgcggcggttggctttccagttccgtcagccactctggatgcgcaatcacgctgtcctgcacaaaatcactaaaagtaagtactgacttcgcctgtgcgctaagtgattcctcggctaaaggctctggcagccgctcaacaacggtctgccagtactgctgtaacggtgaagagagcggcttcataagcgattttatccttgcctgattaacgttttccgctgtgcaaccagaacggttcctgattgtttgcctcattacggaaatgttcaatttcgatgcgttgcccggtcgcaatagcgtgatgcagcccctgccagttctccagccaggcttgcgcgacgacaggatcatagtaacccgccagcaacagtattgagtcaatatcacgcgtctggcgtggcaactggtcacggtagcgatcgcctaacggctggcagaaaacgcttttcagttcagcggcatggcgggaaagatggatatcggcaaagcgtttgaaggagtcgctgattttgccctgcgctttggcatctaaaaatggctgccatgctttgcttaccaaccattcggtcaacgccagcttcgccattgccgtttcggtagagtagaccgccgtcacggcagacaccgcagaagcaatggtcgcctcgcattgagtcagcagatcacgtaagtgagtgctcgctttacgcggcacaataccaccgaacagcatcagcgtatgacggaccaggctaatggctgccagcacctgttctttcgccgcatcgttgccgcgtacccacagttcttcatgatactgccattgcgctaacgccagctcgagcgccgcttccagcccctgttccacatcggcttttgccgcaacatgcaaaatggtggtcggtttgatttcacgcgccggattgccctgcgccagatgatagccacgcgccgctttgctcaggctgccctggcgtaatccggtttgcgataccagttggttcgccagtttcagcaccgcgcgcgtgtcgccgctaagcagttccagttccagctcacagataggttcagcaaattcacccgctttcacttccccctggtcgagggcgatttcaatttggctaccatcgaccgccaccagccatttttcgcgataaaaatcggtgctgaacagcggctgcacgcgggaggcgagatcggcgggcaattcgccgttcggccagacttccgtcggtaactgcgccaggtcgagcgtcggttcgctcaacgccacgttatattccgggcgctgatgtaagccgcctgtcactcttcctgcaactttcatggtcatctcatagcgaccgttttcgccacgaatacgtaagcccatatcgtgcccacgcagccagttatccggcgtttcgtagtaaatattcagcaactgcacggggtcatggtgctcgccgcccagcgtattgagatggtcacgcaacgcctcaacggcactgtgattaacaataaactttaattcgatttcctgagccatggcctttacttatcggttatgtcacataagtgacgatgaacggcgaacttaatgcgatcttttttgtcagtagatagtattttgcgccaaattgccatgcaacgggcaatttgacgggcgtaaaagtttgaagcagtggcaagacctgacacagaggattccgattgatgtcgaatgctttgcgtagcgacactgatgccactactatcgttccactttccatgacaataacgacagcctgatgccaaaattacgcctgatcggattaactttactcgcacttagcgcgactgccgtctcacacgctgaagaaacgcgctatgtttccgacgaactgaatacctgggtccgcagcggtccgggagatcattatcgcctcgtgggcacggttaacgccggcgaggaagtgaccttattacaaactgacgccaacaccaattatgcccaggtgaaagacagctctggccgtaccgcctggatcccgttgaaacaacttagcactgagccaagcctgcgctcccgtgtgccagatctggaaaatcaggtcaaaaccctgaccgataaactcaccaatatcgataacacctggaatcagcgcaccgcagaaatgcagcaaaaagtggcgcagagcgacagcgtgatcaacgggttaaaagaagaaaatcagaaactgaaaaacgagctgattgtcgcgcagaaaaaggtcgatgccgccagcgtacagctggatgacaaacagcgcaccatcatcatgcaatggtttatgtatggcggtggcgtgctggggcttggcttgctgctcggtctggtactgccgcacctgatcccaagccgcaaacgcaaagatcgctggatgaactaaatcgccttcttcgttgcactgtcttattattaggaattgtgtatttgacgaagggatgatggcgtgaagatttatctggtcggtggtgctgttcgggatgcattgttagggctaccggtcaaagacagagattgggtggtggtcggcagtacgccacaggagatgctcgacgcgggctaccagcaggtaggccgcgattttcctgtgtttctgcatccgcaaacgcatgaagagtatgcgctggcacgtaccgaacggaaatccggttccggttacaccggttttacttgctatgccgcaccggatgtcacgctggaagatgatcttaagcgtcgcgatctgaccattaatgcgctggcccaggacgataacggcgagattatcgacccgtacaacggtctgggcgatctgcaaaatcgtctgttgcgccatgtttcccccgcttttggcgaagatccgttacgcgtattgcgcgtggcgcgttttgctgcgcgttatgcccacctcggttttcgtattgccgatgaaactctggcgttgatgcgcgagatgacccatgcgggtgaactggaacacctgacgcctgaacgggtatggaaagagacggaaagcgccctcaccacccgcaatccacaggtgttcttccaggtactgcgcgattgcggcgcactgcgcgttttattcccggaaattgacgcactgtttggcgttccggcccctgccaagtggcatccggaaatcgatacgggtattcataccttaatgacgctctcaatggcggcgatgctgagtccgcaggtcgatgtccgtttcgcaactttatgccacgatctcggtaaagggctgacgccgccagaactctggccgcgtcatcatggtcatggcccggcgggtgttaagttagtggaacaactatgccagcgtctgcgcgtgccaaatgaaattcgcgatttagccagactggtggctgagtttcacgatctcatccacaccttcccaatgctgaacccaaaaaccatcgtcaaattatttgattccatcgatgcctggcgtaaaccgcagcgtgtcgagcaactggcgctgaccagcgaggctgacgtgcgcggcagaaccggttttgaatcagcggactacccgcaaggccgctggttgcgcgaagcctgggaagtggcgcagtcagtgccgacaaaagccgtcgttgaagcgggatttaaaggtgtggagattcgcgaggagctgacccgacggcggattgcggcggtagccagctggaaggaacaacgttgcccaaagcctgaatgagtattgggcattttgccggatgcggcgtaaacgccttatccggctacatgtcaacgacagttgtaggcctgataagacgcgcaagcgtcgcatcaggcgttgattgccggatgcggcgtgaacgccttattcggcctacgcaatcgttgacaacgccaagcatccgacactattcctcaattaaaagaacacgacatacaccgcagccgccacaataaagcgataaatggcgaacgggataaacgaaatgcgcttaatcaattgcaggaaggttttaatcgctatcagcgccaccacaaaagcggtgataaacccaacggcaaacatcgggatatcgccgcttgtcaggaagccccagcttttgtagagatcgagcgccgttgcgcccatcatcatcggcaccgccagcaggaacgaaaactcggaagcagcgtaacggctcacccccatcagcatcccacctgaaatggtcgccccggaacgggagaaacccggccacagcgccagacactggaaacagccaatcataaatgcctgacgataggtcatatcatcaagacccggcgcacgcggctctttcggcttcaggcattcggcggcaatcagcaacaaaccgccaacgaccagcgcatacatcacatttatcgggttaaacaatgacttaatcgtgtcgtggaacaacagccccaataccaccgccggaatcatccccagcaaaatgtggatcagcgttaaacgacctttgctttcaccttcgtgctgcaacgggcggccaaagtggatgccaatcaggccaaacagacgccgccagaacatcactactaccgccagaattgatcctaactggatcacaacttcaaaggttttcgccgtgtcgccctcaaaccccaacaagtgaccgacaataatcatatggcccgtgctggataccggcagaaattctgtcaatccttcgaccacacccaatattgccgctatcagcagcgagtgcatatcgctcatcaataaacccctaaattattaaaatgtaccgcttgtccgaactactgcgtatgaccaggttataaccgtttggtttaacagctgtaaaattaattattttctttcagattattgccacgctcaatgattacgccaacattcgccgcccgcgccactgcgcctggcttgctgagtttgatacgcacccacggcgagttgaagcgtgctaacagcagctccgccacctcttcagccacgcgttccaccagcgcaaaacgcgccccctcgacgtggctgaccaccgtttctgcaatgtcagcgtaactgaggcaatccgccacatcatcacttttcgccgctttacggttatcccacgccatttcgatatcgaacactaacttctgttcgatggtctgttcccagtcgtaaacaccaatagtggtgattaccgaaagttgctctataaatacaatatccatcacgtcctgcctgctttttggctaaccggataccacttccggcgaaatgtgcgtattatccacagattcatcgttgaacacgaattttcaaaacggaacagcttatgagtgcaatcgcgcctggaatgatcctcatcgcgtacctctgcggctccatttccagtgccattctggtttgccgcttgtgtgggctgcccgatccgcgaaccagcggctccggcaatccaggcgcaaccaatgtgttacgtatcggtggcaagggagcagccgtagcagtactgattttcgacgttctgaaaggaatgttgcccgtctggggcgcgtatgaattaggtgtcagccccttctggctaggcttaattgccatcgccgcctgtcttggacacatctggcccgttttcttcggatttaaaggaggaaaaggcgttgctaccgcttttggtgccatcgcacccattggctgggatctcaccggagtaatggcgggaacctggttactgaccgtgctattgagcggatactcgtcgctgggagcgattgtcagtgcactgattgctccgttttatgtctggtggtttaagccacaattcaccttcccggtttcgatgctctcttgcctgatcctgctgcgtcatcatgacaacatccaacgtctgtggcgtcgtcaggagacaaaaatctggacgaaattcaaaagaaagcgcgaaaaggatcccgagtgatttctggtggatctacatgacctgatagccttcatcgggcttgcccagccgttgctggcaccatgccgccagaaattccacgcagacacgtaatttcatgctgcgatagagcggctcccggtaaacagcccagatattggcgctttgtgcatactctggcaatacttgcaccagtttgccactctccagaaacggcaacacatcccactcggaacgcagcataatccctttgccctccagcgcccattgcagcacaatctcgccgctattggaggaaagatgcccgcttaccttcaccgattttttctcctgaccgttccccaactcccatattccatgggtcatatcgcgctctttggtcaccagacagtcatgacgacttaattcctgtagggattgtggctgcggatatttttgcagatactcaggtgctgcgcataatattcttttattttttgtcaaaagatgcgcaatataataatcaggaatttcgtcattaatacgaatatccagatcaatattatcctgcactaaatcaatttgccgatcgaacaattcaaaatgcacctgtaactcaggataattgcgcatcagttcggtaatagctggcgcaatatggctgcgcccaaaaccaaaactgcaaccaatacgaatcatcccctccgggcgcgttttgatttgcgtgacgtcatcgaccagtcgctgatattgggtgaggatttccaacgcatgttcgtaacaacgttggccactttcagtcagcgccacgccgcgagcggagcggttcagcagcgttgttgccagcgtattttcaaggatttggatccgcttggtgacaaatgcaggcgtctgcccaagcgtcgccgctgcggcgctaaaactcccgctgtgaacgatttctaccagtacctgcaagtctttggctaaaggccagctattcagcatcgttaattatccgcagttgtgataagcgcagtgtatttcgcaaaacattgccattccctgctctggcgcaatattcattcttattttcgcgttgattcacgaactgttaattacatattcacggtggcaaaaaatataaaaccacatttttagtggtagtttgtggcggtgaatttttccagacaaatacaaaaactggagttgccatgatgagcgaaagtaataagcaacaggcagtgaataagttgacagagattgtcgctaactttaccgccatgatttctacccgaatgcctgatgacgtggtggataaactaaaacagctaaaggatgccgaaacgtcgtcgatggggaaaattatctaccatacgatgttcgacaacatgcaaaaagcgattgacctgaatcgtcctgcctgtcaggacaccggggagattatgttcttcgttaaagtcggttcccgcttcccactgcttggcgagctgcaaagcatactcaaacaagccgtggaagaggcaaccgtcaaagcgccactacgtcacaatgcggtagaaatttttgacgaagtaaacaccggcaaaaataccggtagcggcgtaccgtgggtcacctgggacatcatccccgacaatgacgatgcggaaatcgaagtttacatggcaggcggcggctgcacgctacctggccgctcgaaagtgttaatgccgtcagaaggctacgaaggcgtggtgaaattcgtcttcgaaaatatctccaccctcgccgtaaacgcctgtccaccggtactggtgggcgtgggcatcgccacctcggtggaaaccgccgccgtactctcgcgtaaagccattttgcgcccgattggcagccgccatcccaatccaaaagcggcagaactggagctacgcctggaagaaggactcaaccgtctggggattggtccacaagggctgaccggcaacagttcagtgatgggcgtacatatcgaatctgccgcccgccatccgtcaaccatcggcgttgctgtctctaccggctgctgggcgcatcgtcgcggcacgctgctggttcatgccgatctcacctttgaaaatctgtctcacacccggagcgcgttatgaaaaagatcctgacaaccccgatcaaagctgaagatctgcaagatattcgcgtcggcgatgtgatctacctgaccggtacgctggtgacctgccgcgacgtttgtcaccgccgtttgatcgaactgaaacgtccgatcccttacgatctcaacggcaaagcgattttccacgctggccccatcgtgcgcaaaaacggcgacaaatgggagatggtctccgtcggcccgacaaccagtatgcgtatggaaagttttgaacgtgaatttattgagcagaccggcgtgaaactggtggttggcaaaggtggtatggggccgctgaccgaagaaggctgccagaaattcaaggcgctacatgtgattttcccggcaggctgcgcggtgctggcggcaacccaggtggaagagattgaagaagtgcactggacagagctcggaatgccggagtcactgtgggtctgccgggtcaaagagttcggcccgctgattgtctctattgatacccacggcaacaacctgatagccgaaaacaaaaagctgttcgccgaacgccgcgatcccatcgtggaagagatctgcgagcacgtccattacatcaaataaccctcccggagaggctcacccctctcctttttcgcaggcataacacgatgaaaccttccactgaatggtggcgatatcttgcgccgctggcggtcatcgccattattgctctacttccggttcccgcagggctggagaaccatacctggctctactttgccgtttttactggcgtgatcgttggactgatcctcgaacccgtgccgggtgccgtggtggcgatggtgggtatatccatcatcgccatactctctccctggctgctgttcagcccggagcagctcgctcagccaggctttaaattcactgcaaaatccctctcgtgggccgtttccggtttttctaattcggttatctggctgattttcgccgcctttatgtttggcacaggctatgaaaaaaccgggcttggacgccgcattgcgctgattctggtgaaaaagatgggacatcgcacgctgtttctcggctatgcggtgatgttctccgagctgatcctcgcacctgtaacaccgtccaactcggcgcgtggtgcggggattatctatcccatcatccgtaacctgccaccgctctatcaatcacaaccaaacgacagcagttcgcgcagcattggctcgtacatcatgtggatggggattgttgccgactgcgtgaccagcgccattttcttgacggcgatggcaccaaacttgctgttaattggactgatgaaaagcgcatctcacgccacgctgagttggggcgactggttcctcgggatgttgccgctcagcattttactggttctgctggttccctggctggcttacgtgctgtacccgccggtactgaagtctggcgatcaggtgccgcgctgggcagagacggaactgcaggcaatgggcccgctctgttcgcgtgaaaaacggatgctggggctgatggtaggcgcgctggtgctgtggattttcggcggtgattatatcgatgccgcgatggtcggttacagcgtggtggcactgatgctgcttctgcgcattatcagttgggacgacattgtcagtaataaagcggcgtggaacgttttcttctggctggcctcgcttatcaccctcgccaccggactcaacaacaccggttttattagctggtttggcaaactgttagcaggcagcttaagcggttattcgccaacgatggtgatggtggcgttgattgtggtgttttatctactgcgctactttttcgccagcgccacggcgtatacctccgctctcgcaccgatgatgattgccgctgcgctggcgatgccggaaatcccgctgccggtgttctgcctgatggttggtgcggcaattggtctggggagcattcttacaccatacgccaccggccccagtccgatttactacggcagtggttatctgccaacggcggattactggcgactgggggcgatttttgggctgatattcctcgtattgctggtgattaccggcttactgtggatgcccgtggtgttgctttaagtgaggacggtgccggaaattgctctccggcacccaatagttttacgcagccggtaactccgccagcggccagcgcggacgcacgctaacgccgagatccgccgtcgcgcctgctttaaaccgcaccattccggcataggcgatcatcgcgccgttatcagtacaaaattccggacgcgcgtagaacacttcgccgcggcgttttttcatcatttcagccagcttcgcccgtaacgtacggttagcactcacgccgcccgccatgaccagtcgcttaaagcccgtctgatccagcgcccgcttgcacttaatcatcagcgtatcgaccaccgcatcttcaaaggcgcgggcgatatcagcacgcgtctggtcgtcggtgccgttgtcacgaatggtatttgccgcgaaggttttcaggccggagaagctgaaatccagccccggacggtcggtcatcggacgcgggaagacaaagcgcccggcagtaccctgagccgccattttcgacagtaacggcccgccaggataatccagccccagcagcttcgcggttttatcaaacgcttccccggcggcatcatcgatagactcgccgagcagctcgtactgaccaatgccagtcacgctgattaactgcgtatgaccgccggaaacaagcagcgcaacaaacggaaattccggcgggttatcttccagcatcggcgctaacagatgcccttccatatggtgtacagggatcgccggaacgtcccaggcaaacgccagagaacgccccacggtcgcgccaaccagtagcgcgccgactaatccagggcctgcggtataggccacagcatcaatgtcttttgccgttaaaccagactcctttagcgccgcctggatcaacggtacggttttacgcacatgatcgcgggaggccagttcaggcacgacgccgccgtagtcagcgtgcaatttcacctgactatacaattggttggctaacaaacctttttcatcgtcgtaaatggcgatgccggtttcatcgcaggaagtttcaatacccagtacacgcatgacttgttttacctcgctttattaccgcgcagtgtaggaccaatgcgggttgatgtaaaactttgttcgcccctggagaaagcctcgtgtatactcctcacccttataaaagtccctttcaaaaaaggccgcggtgctttacaaagcagcagcaattgcagtaaaattccgcaccattttgaaataagctggcgttgatgccagcggcaaaccgaattaatcaaaggtgagaggcacatgccggtaattaaagtacgtgaaaacgagccgttcgacgtagctctgcgtcgcttcaagcgttcctgcgaaaaagcaggtgttctggcggaagttcgtcgtcgtgagttctatgaaaaaccgactaccgaacgtaagcgcgctaaagcttctgcagtgaaacgtcacgcgaagaaactggctcgcgaaaacgcacgccgcactcgtctgtactaattccccgagagcgttgctctccgatcagaccgagttgtagttgtaaggccgtgcttccgaaaggaatgcgcggcttattttcgtttatgaattgctaaaaatcggggcctatggctggacgaatcccacgcgtattcattaatgatctgctggcacgcactgacatcgtcgatctgatcgatgcccgtgtgaagctgaaaaagcagggcaagaatttccacgcgtgttgtccattccacaacgagaaaaccccgtccttcaccgttaacggtgagaaacagttttaccactgctttggatgtggcgcgcacggcaacgcgatcgacttcctgatgaactacgacaagctcgagttcgtcgaaacggtcgaagagctggcagcaatgcacaatcttgaagtgccatttgaagcaggcagcggccccagccagatcgagcgccatcagaggcaaacgctttatcagttgatggacggtctgaatacgttttaccaacaatctttacaacaacctgttgccacgtctgcgcgccagtatctggaaaaacgcggattaagccacgaggttatcgctcgctttgcgattggttttgcgccccccggctgggacaacgtcctgaagcggtttggcggcaatccagaaaatcgccagtcattgattgatgcggggatgttggtcactaacgatcagggacgcagttacgatcgtttccgcgagcgggtgatgttccccattcgcgataaacgcggtcgggtgattggttttggcgggcgcgtgctgggcaacgatacccccaaatacctgaactcgccggaaacagacattttccataaaggccgccagctttacggtctttatgaagcgcagcaggataacgctgaacccaatcgtctgcttgtggtcgaaggctatatggacgtggtggcgctggcgcaatacggcattaattacgccgttgcgtcgttaggtacgtcaaccaccgccgatcacatacaactgttgttccgcgcgaccaacaatgtcatttgctgttatgacggcgaccgtgcaggccgcgatgccgcctggcgagcgctggaaacggcgctgccttacatgacagacggccgtcagctacgctttatgtttttgcctgatggcgaagaccctgacacgctagtacgaaaagaaggtaaagaagcgtttgaagcgcggatggagcaggcgatgccactctccgcatttctgtttaacagtctgatgccgcaagttgatctgagtacccctgacgggcgcgcacgtttgagtacgctggcactaccattgatatcgcaagtgccgggcgaaacgctgcgaatatatcttcgtcaggaattaggcaacaaattaggcatacttgatgacagccagcttgaacgattaatgccaaaagcggcagagagcggcgtttctcgccctgttccgcagctaaaacgcacgaccatgcgtatacttatagggttgctggtgcaaaatccagaattagcgacgttggtcccgccgcttgagaatctggatgaaaataagctccctggacttggcttattcagagaactggtcaacacttgtctctcccagccaggtctgaccaccgggcaacttttagagcactatcgtggtacaaataatgctgccacccttgaaaaactgtcgatgtgggacgatatagcagataagaatattgctgagcaaaccttcaccgactcactcaaccatatgtttgattcgctgcttgaactgcgccaggaagagttaatcgctcgtgagcgcacgcatggtttaagcaacgaagaacgcctggagctctggacattaaaccaggagctggcgaaaaagtgatttaacggcttaagtgccgaagagcgatcgggaagcccccgacagccgcactgagaggcagcggcaaatatataagtacgccctcgtaattatcgttggcggtaaacaaccgttggatttcagcgttaacggctgaaggacatcgggtcaatcgcccaacaccaacctcatgaaataagtgtggataccgtcttatggagcaaaacccgcagtcacagctgaaacttcttgtcacccgtggtaaggagcaaggctatctgacctatgccgaggtcaatgaccatctgccggaagatatcgtcgattcagatcagatcgaagacatcatccaaatgatcaacgacatgggcattcaggtgatggaagaagcaccggatgccgatgatctgatgctggctgaaaacaccgcggacgaagatgctgccgaagccgccgcgcaggtgctttccagcgtggaatctgaaatcgggcgcacgactgacccggtacgcatgtacatgcgtgaaatgggcaccgttgaactgttgacccgcgaaggcgaaattgacatcgctaagcgtattgaagacgggatcaaccaggttcaatgctccgttgctgaatatccggaagcgatcacctatctgctggaacagtacgatcgtgttgaagcagaagaagcgcgtctgtccgatctgatcaccggctttgttgacccgaacgcagaagaagatctggcacctaccgccactcacgtcggttctgagctttcccaggaagatctggacgatgacgaagatgaagacgaagaagatggcgatgacgacagcgccgatgatgacaacagcatcgacccggaactggctcgcgaaaaatttgcggaactacgcgctcagtacgttgtaacgcgtgacaccatcaaagcgaaaggtcgcagtcacgctaccgctcaggaagagatcctgaaactgtctgaagtattcaaacagttccgcctggtgccgaagcagtttgactacctggtcaacagcatgcgcgtcatgatggaccgcgttcgtacgcaagaacgtctgatcatgaagctctgcgttgagcagtgcaaaatgccgaagaaaaacttcattaccctgtttaccggcaacgaaaccagcgatacctggttcaacgcggcaattgcgatgaacaagccgtggtcggaaaaactgcacgatgtctctgaagaagtgcatcgcgccctgcaaaaactgcagcagattgaagaagaaaccggcctgaccatcgagcaggttaaagatatcaaccgtcgtatgtccatcggtgaagcgaaagcccgccgtgcgaagaaagagatggttgaagcgaacttacgtctggttatttctatcgctaagaaatacaccaaccgtggcttgcagttccttgacctgattcaggaaggcaacatcggtctgatgaaagcggttgataaattcgaataccgccgtggttacaagttctccacctacgcaacctggtggatccgtcaggcgatcacccgctctatcgcggatcaggcgcgcaccatccgtattccggtgcatatgattgagaccatcaacaagctcaaccgtatttctcgccagatgctgcaagagatgggccgtgaaccgacgccggaagaactggctgaacgtatgctgatgccggaagacaagatccgcaaagtgctgaagatcgccaaagagccaatctccatggaaacgccgatcggtgatgatgaagattcgcatctgggggatttcatcgaggataccaccctcgagctgccgctggattctgcgaccaccgaaagcctgcgtgcggcaacgcacgacgtgctggctggcctgaccgcgcgtgaagcaaaagttctgcgtatgcgtttcggtatcgatatgaacaccgaccacacgctggaagaagtgggtaaacagttcgacgttacccgcgaacgtatccgtcagatcgaagcgaaggcgctgcgcaaactgcgtcacccgagccgttctgaagtgctgcgtagcttcctggacgattaatcggtaggccggatcaggcgttacgccgcacccggcactaggccctctgcacaaacgccaccttttcggtgtaatgccgatcagttaaggatcagttgaccgatccagtggctgtgtaagaatccggaaacgctcacttgtttccggatttttttatgcacattggacaggctcttgatctggtatcccgttacgattctctgcgtaacccactgacttctctgggggattacctcgatcccgaactcatctctcgttgccttgccgaatcaggtactgtaacgctacgcaagcgccgtcttcccctcgaaatgatggtctggtgtattgttggcatggcgcttgagcgtaaagaacctcttcaccagattgtgaatcgcctggacatcatgctgccgggcaatcgccccttcgttgcccccagtgccgttattcaggcccgccagcgcctgggaagtgaggctgtccgccgcgtgttcacgaaaacagcgcagctctggcataacgccacgccgcatccgcactggtgcggcctgaccctgctggccatcgatggtgtgttctggcgcacaccggatacaccagagaacgatgcagccttcccccgccagacacatgccgggaacccggcgctctacccgcaggtcaaaatggtctgccagatggaactgaccagccatctgctgacggctgcagccttcggcacgatgaagaacagcgaaaatgagcttgctgagcaacttatagaacaaaccggcgataacactctgacgttaatggataaaggttattactcactgggactgttaaatgcctggagcctggcgggagaacaccgccactggatgatacctctcagaaagggagcgcaatatgaagagatcagaaaactgggtaaaggcgatcatctggtgaagctgaaaaccagcccgcaggcacgaaaaaagtggccgggactgggaaatgaagtgacagcccgcctgctgaccgtgacgcgcaaaggaaaagtctgccatctgctgacgtcgatgacggacgccatgcgcttccccggaggagaaatggcggatctgtacagtcatcgctgggaaatcgaactgggatacagggagataaaacagacgatgcaactgagcaggctgacgctgagaagtaaaaaaccggagcttgtggagcaagagctgtggggtgtcttactggcttataatctggtgagatatcagatgattaaaatggcggaacatctgaaaggttactggccgaatcaactgagtttctcagaatcatgcggaatggtgatgagaatgctgatgacattgcagggcgcttcaccgggacgtataccggagctgatgcgcgatcttgcaagtatgggacaacttgtgaaattaccgacaagaagggaaagggccttcccgagagtggtaaaggagaggccctggaaataccccacagccccgaaaaagagccagtaagttgcttaactgactggcattacaccttttcggtggcgttttttatcgcccacgcactaccagcgcctggtccagctcgcgatacgcttcaaccagtttctccagtgaaacgcgacttaaaccgctgggatttggcagcacccaaatctgcgtcgaaccaatggtgagcgtttgtttcccccactgtgcaccgcgctggctgaatccctgttcatatgcttgtttgcccagaatcgccaacgcctgcggctgataatcttcaattttttcaatcagcttacgcccgcctgcgtgtagctcctgctttgaaacttcattggcttgcaccgttggacggtctaccagtttggtgacgccacaacgataatccagcagatgctgtgcctcctgcggcttcaactgacggtcggtaaacccggcctgatatatcaccttccagaagcgatttgccggatgagcaaagggaaaaccagtcccggcggatgaaagcccagggttgataccgcaaaacacgacccgtaaccctggagccaaaatatcctcaaccatatttactcctttctaacatcaccaggaaaagtataacggattgaaaatacattgtttataaaaacagcaggcgcgcggtaatggctggattgcgacacggagttactttataatccgctaccatggccccttagctcagtggttagagcaggcgactcataatcgcttggtcgctggttcaagtccagcaggggccaccaaattgacattcggttagtatcagatacggccagttaatcagacgaaacccgcgccacacaaggcttgcgggttttttattgtccagttttggccagtttgctaaggtataagccagattctttaggcatacatcaaggcatatcctcacaaacagaagcaatctcgtatgccttaaacctgtttcgggatgcaaccagtggccaaaaacacaaaattacttacaccagcgacgattaaaagtttgcagaagaaatcgctcaccgccgagaaggatttatttatcacggatggcgatgggctggagttagttgtgaaagcgggtagcgcatcagccttatggcggttccggtactacaagccacacaccaaaaaacgggcaatgttaagccttggtgcatatcccgaaatcagcattgccgatgctcgcaggattaaagacgagtatcgctcactggtcgcaaatggaactgaccccaaagaacacagggaaaaacaacgccgggatgatgaaatacggcgattaaacacatttcagcgcgtggccgaagaatggtttgaagtaaagcgcggccagaatctggcggcaaatacactccgtgatatatggcgttctcttgagcgtcatgtgctgccacccataggccatcgcccaatcacagaactggttgcacgggattttatcgaagccctgaaacctgtatcagcacagggcaaagcggatacggtgcgacggctggcacaaagaatcaatgaggttatgtattacgcagtgaatattggattaattccagctaatcccgccgctcaaatcagcaaggcattcaacccacctgtagttaaacacatgccaacaatcaggcctgatgagttgccggaatttatgcaaaaactggcaacggctcgcgcagaacttcaaacgcgtcttgttattgaatggcaattattaactatttgccgcccatgcgaggcagccggggcacagtggagcgagatagatgcagatgccagagtgtggcgtatatcagccgggcgactaaaacaacgaagggagcacattgtccccctgaataatcaggcaatggccattcttgaagccatgcgcccaatcagcgggcatcgaaagtttgtttttccacataacagcgaccccatgcgtgggatgcatcaacagaccgcaaacgccgctatcaggcgcatggggtataccggaaagctggtggcgcatggtttacgctctgtagcaagtacggcgcttaatgaacaggggttcccgccagatgtaatagaggctgcgctttcccatctggataaggacacggtgagacgggcttacaatcgctccacatatctggagcaacgccgcccactgatggcgtggtggggtgattttatcgaacaggcagcaaccggaagccttagtgcaactggcggttttcgtggcttaaaagtggttggtgaataatatggcattacctaaaagattgttttactcactacgcgatgcggccagttatctgactgcaaactccaataagtgcagtgttgatgatttgcttcattttgctgacataggaatgctggagatttgtacacatatatcaggaaggtggcgggctgaaattgacctgtttaaccattatgaaactaaatcaactgataagtatgttttatttaaaccgcttggcgattcactgtgtcagctaccatttaccgtctatacaccatatagcgcgggagattttgaagtcacaacagcaattctgtttatcagtgaagaacgtcccagaggtattccgaaaaaccaaatacctttaatgggatacaggtacttgaccatagaagggttaatgtccatatgcaacctgaccaaatccatgcctttttatgattttgtaaaatatggaaagtcatcggctcgtttttctcttggaaagccaaggacaatgaacactgacggtgacgattattccctcagcccgatgattacttttgattccagtccactcgatgtaagcattgatgacctgtttattaccgccgaagaaatcgaaatccttaaggatggcgggagagattgcgctaacgggatgttaatggggtgcataactaaaaaactaccatcaccgacgacacaaccagacccaagaagcgcactgcctgcttttgtggatgatttgctttatctgtattacaaggatgaaacgaagcgaggcaaaccatggcttcatgtaagagaagacaaaaccaagggccagccaacagaattagaaaacgatttttgcaaagctggtttatctctgccctcacaaaaaaccatgcgacgctggtttaaggttgattagtcaattcacgaatgagtatacgccggacatgtcagccatctgatggacatgtccggcaatttcacgccttcttgtgcttccatattgttatggccagttagggccaattaatacaattaagaggcgaaatatcatggacaccacacaagataaaatcctcaccaaacgcgaggttgctgcgcgtctgcgccttcgttccactaccagcattgacgacatgattcgggctggcgaatttatccccggctttcgtcgcgggctgcgccgcgttggatggtttgaatccgaagttaatgcatggcttgcggcccgcgtggaggaacgcaataacgtaatggcagaaattatcgccagagcgcaaaaaaacaaagaacccaccagccactaaccaaccgcgataatcattatgaaaatgccagaaaggcccgtaacagggccggggcgttctcacgcccaaaacaaccaccacacgccccacgggatgggcggcaaccgcaaatattgcttgcctgccatcgctggtgggcgttatatttcccccgctggtgtaaatccaccagccgggcgtagcaacccgtttaatgagcaaaaggcgacacagacgcgcccagcgtctttttttgtgtcgtgccatcgcgcacccatgcacagcggcaagacccgcactgtatctatggtggcgctggtggggcagccgaaaggctggccggtttccttttgcgccggtattgctacccccgccagcgtcaccgccatttatgagcgtagcaactcaggcggtgactccttaaatttgcaaaaggaggctgccagaatggctacgaccccaaccccgttacaccctgaatttacctttcactttctggctgttcgccgttccgacctgaacgaccgcccacaccgcgaatccgtcaacgcacccgatgaaacaaccgcccgccgtatgctggcgcgtgattttgtgttgctgtttgctggccgcgttccggctcagggggtgcgccatgtgtgatgtatacagcacccgcgtacatgaagtgttaatcgcagccatcaaaaatgcagatatgcaggaagcccgcgcaatgtttgatgatgcggattactgcgcccgcaaactgcttgatgcgctggctggcacagggcggctactttcggtaattggcgacaacaatgctcttggtccgaatgaactacgcagcctgggcgattccatcgctgttacggctgaacttgtggccggattcagtgaggttgtggaggcgtataactggcgctgccgcaccgggggaatcagggaggacgggcaacatgcatgatatagccacgattaacgcaatccgcagcgttgccgcagtggcggcacaacatgcggaaatcctcgttcctgaatggctgcccgaaggtaaacggcaggccactgaatgggtgtgtcgtaaccccacgcgtgcagatcgtcacgcgggcagtttttccgtctcgctggtggacggatgctggcacgacttcgccaccggggacagcggcggcgaccttgtggcgctgggggcttatttgtggaatgtgcgtcagactgatgccgcccgtattgtggcggacaggctggggctgtgcctgcccgcgctgggcaaacctgatgtaatgacccgcgaacaacgggaggcgcaacgggtgcgggtacaggccgcagaacaggaggcggccagactccgccagcgggagcagcaacaacgccaccagcgccagaaactgactgcctgccgggcctttgagttgcttggccgggcggaggtggcaaacccttctcatccctatctcatgaaaaaacggctacagcccggcaatctgtatcagtcgggtaatgatttgcttgtcccgctgtacaacgtatgcggcgaagtggtgaacgtgcagattatcagcccggacggtcgaaaaatgtttctccgtgatggtcaggtgcagggggctttccatgttatggggaactttgacctgatggccccggaagcgccggaacatgacgtttacgtgtgtgaggggtgggccaccggggccgcccttctccagtactggaacgtcatggccgtggtgtgtgccatgaatgcgggaaaccttaaacatgtggctatggcgctgcgtgagcggtacagctcacgtatatctctcgttattgccgggaatgatgaccgggcatcaaaagataaccccggttccagagcagccaacgaagccgcattgctggccgggtgttacgtcacattcccggaatggccgcccggtgcatcaccagacctttccgactttaacgatttgatgctatgggaaatggagcatgacccggacaaccactaaaaccccggtcacatccgggaagcgaaaaccaccacgcaagaaacaccccaaagtcagcccggcgcgtccgggctacgccacttattcgcagcatgtgcaggtggacggcggccagattctgaaacccggcctttactggcacggcgtgcgcgactcaaccaacacagacacgtttatctgttccccgctggaagtcatcgccatgaccagcgacagcaaagacgaaaactacgggcgattactccgttttctcacgccgtcaggccagtggcgggaatgggccgcaccgatggaaatgctcgccggagacggcggagaactccggcaggaactgctacgcatgggcgttaccattccctacaaacaacggcaggcactgactgaatacatcatggagtcagcaccaaaacgccgggcgctcgcggccacggccaccgggtggcactccccggccctgtttgtcatgccgggcggggttatcggtgatggtgatgtggtgtttcagtcaacagaagcaggctcacaggagtacgccactgcaggaacgccggagggctggcgcaacaacgtggccgcattatgccggggaaacccggtagccatgctggccgtgtgtgcatcgctcgccgggccgttgctgtggttgcttgatgtggacagcggcggattccatttcatgggcgacagttccagcgggaaaagcgtgggggcgctggtggcctgtagcgtatggggagaaccccgcaactttaaacgcaactggaacgccaccagcaccgggcttgaagggctggcaaccatgcggaacgataccgcgctgatactggatgaaattggcgaagccccggccagagatattggcgggctgatttatcagcttggcaacggaacaggccgtcagcgtggcaaggtgtccggcatggcccgcccggtcaacacatggcgcaccatgattatttccaccggggaaatgaccgtgggtaaacacatggaaagcggcggccagcgcatcaaggccgggcaggaaatgcggttactggatattccggcacagcggctttacggggcatttgactgtcttcacggaatggcactaccccacaaccccgacaacgacacagaacgccggggagcaggccggaaatttgccgaaacactgcgcggtaatgcggctacccattacggccacgccgggccggagtttgtgcgctggctgatttcccgcaatgaaagtgacaccaccagcaccgacagcaacggccagacgctggcggatatgtacgccatactgcgcgaacaattccccgtaagcaccgggcaggaagcacgcgccgccgcgcgtttcacactgtgcgcactggccggggaaatggcgataactgccgggattctgccgtggaaacagggcgaagcactggaggcagtgaaagcgatgtttgatgcgtgggcgggttatcgtggccgggggcaatcggaggacgtgaaaatactccgggccgtcgcggggtttatcgcccgccatgcttcacgctttgaagggggcagcacatacagcgaaccagtaagcaaccgcgccggatggtggcgaccggggagcaacggcgagcgggtttactggtttttaccggaagcactatgtgaggcggccagcggctacgacctgaaacgcatagcggccagtcttgacgatgctggcgcgattgttgaccgcgacacggacgggaaacgccgatacacaaaacgcgtttccgttaacggggagaaacaccgcgtttacgccatcggccagaatgcattgttattcgcaattgatgaataattaacaaaaattgcgtttttaaaaactgaaaaagtggtgggactggtgggaactgtgggaaccgtaaaaataaaacatatataaatcagtaaataataaaaccaccagtataattattgttcgtttttgagtggggactctgcgggaactggtgggaaccgcagagaacaaaaaataaccgccacggttcccacaaaaagccaacgtgggaactggtgggaaccactgaaagccgcgtggttctaggcggttcccacagttcccaccagtcccaccaacttgcacaatattacgcacggcaaaaaacgcaacataaaaacccggcaatcccttacgtggcgcgggatgcaaggcaattttagtgtgcaaaacgggttaaacagcaaaaccacacagaatagcgaaaaggccagcaatggcgcggcctgcggagcatttaccagtgaattacgaataacgcttttcaggggcaaaaatgcactttttgacgcacaaaatcacgcgaagccagacgcggcgcggcttacagccgtgtttatatgcctgattaccgttttctggcggtaaaaaagaacaccgaaacacacgcgcagcccgcgccacacaagggatacagcgaaatgagcacatcagaacacgcagaaatcacgaaaaaacgccataaaacgcacgttttcagcgattcagaacatcagatttatgcataagttattcagcctgccggatgcattgtgtgagtttatccgggcattacctgcaccggatttaccggaagcgcaccagcccgaaacatggccggaagacaacaccaccagcaacggccaggcgctggcggatatgtgcgccccgtcagcgacgtggctggctgcccgtgatgcgtatatcagccacgtcatgacctgcccgcgttgcgttaccagcggcgttaaaaaaccgcgtcattgcgctgagggtgaacgactacggcagaactacgaccacaccagataaccaccaccccacggcgattaattccgggaacagccgggagaatgcgggagaaggcgggattaatccgggaataaacggaaataaccgggatttcgtgggactgcccgccataaggtggggtggcggtcattattccgcgccgttttccccggcaagagcacacgcggcgcgggctgcgtggcatttcaggccatgccagaaatgaactttttcgcccatttttaccctgaatatggtaaaaaatgctcacccgctgccgggccatgaacaaaatcagccccattatgcatggcggccacataccaccagccacatcacagagcgccattgagtgcccgagagcaccacgagcgccattttaaaacccgtttaaaaacaccataaaagcggcttttattccctgttgaagaaagcgtgtttttcccaataggcatacaaaaaggcatatcgataaaaaataaattgcatttacctgtttaatttcaattaattacacaaccaattaagagacagcagggcagatatagcaaaggctgacgagaaatcgtcagcctttttctttttatatatcagttactttgcgtgccagtaagccgctgcacgtacccgctgtgggtcatactgttccgcttcaaagcggcggcttaaattcttaacgactttaccttcgccggttatccagatgaagtaatcatcggcagggatttgcatctgcgccagacgcgcatctaccgcctgctcatcatgtgccagccattcgatattaaaaccatcaaggtgcgcgagataatcctgacaggcgttatcccgcacgctaaccagcgcactaacttgcggtttaacggcaagtttgctcaacgtttccaggcggcggcgcaatgcgggcattccggattcatcgcagacatacagctgatacgcgtaatcttccggcaccaccagcgaaccgcgcggacctgccaccgtaagtttatcgcccggttgcgcctgcatcgcccagccgctggcgaccccaccgtcgtgaataaagaaatcaatcgccagttcatggcgtagttcgtcatacagcggcgtatagtcacgcgacggtgggcgtggtccttccggccagacgatgccctcttccgttaccgttggcggcacaaagtgagcgtcaggttgaggaaagaagagtttgctgtgatcgtcaaagccacgcgatgtaaaaccgtccagcgcctcgccgccgaggacaatgcgctgaaaaccggcgctgatgcgctcaacgcgtaacacagtcagttcacggaagcgcagatcattgcgaacgcgctgcgggtagcggggggtgttattcattgttatcgccttcgtgatggtaatcagatatatctaaataaaacccgcaaatgataatgattgttaatcatgataaatgcaagcgatttgtagaactgatatgtctatagtctgataagacgaaccgcctcttctcaggcatcattactcaacgccggatgcggcgtgaacgccttatccggcctacgtgtgagatgagtccacgtttaaaaatcatttttacacttgcaagaacgctcatatcagatataaattagatatatctaattaagcaaaaggaggctgatatgagccatcatcacgaagggtgttgtaaacatgaaggccagccacgccatgagggctgctgcaaaggtgagaagtcagaacacgagcactgcggacacggtcaccagcatgaacacggtcaatgctgcggtggtcgccacggtcgcggcggcggtcgtcggcaacgtttctttggtcacggtgaattacgtctggtgattctggatattctctcgcgcgatgacagccacggttacgaattgattaaagcgattgagaatctaacccaggggaattacaccccaagcccgggcgtcatctacccaacgctggattttctgcaggagcagtcgctgattaccatccgcgaagaggaaggaggtaagaagcagattgcgctgaccgaacaaggcgcgcagtggctggaagaaaaccgcgaacaggtggagatgattgaagaacgcatcaaagcgcgttgcgttggcgcggcgctgcgccagaacccgcaaatgaagcgggcgctggataattttaaagcggtgctggatttacgcgtcaaccagagcgatatcagtgatgcacaaataaaaaagatcattgcggtgatcgaccgcgccgcttttgatattacgcaactggattaatcgccgcatccgccagtggcgcggtgcaattgccggatgcgatgctggcgcgccttatccggcctacacccgctacacaccccgcaggcctgataagatgcgccagcatcgcatcaggcattgtgctccaaccgccggatccggcataccgattaatgcagtaccgtcaccgcgtcttccagtcggctggcgcggtgtttcaccatcgccgacacctgcgcactctcttccaccagctcggcatttttctgggtgatcaggttaagctcatccactgcacgggtcaggctggaaagcccatcggcctgttccagcgttgaatggctaatctgggcgatcaactgggtgacgtttttcacctgtgccacaatatcttccatcgtccgtccggcggcgtgtacctgctgcgaaccggattgcaccttatcagcactggcatcaatcagcttgcgaatatcgttggcagcattagcgctgcggctggctaaatgacgcacttcccctgccaccactgcaaaacctttgccctgttcgccggcacgcgccgcttccaccgccgcattcagggccagaatattggtctgaaacgcaatatcgttaatcagcgaagtaatggtgccaatgcgctgggtactgtcggcgatatcgtccattgtcttgatcaccgtggtcatcgcctccccaccctgcactgccgcattactggcagtgattgacagtttatcggcagccgacgccgtggcagagttctgtttcaccgacgccgccatttggttcatggtcgccaccgtttgctgaacgttatcaactgtctgctgggtatgttcgttcagttcatcggtgcctttcgccagcgtctcactgccatttctgacactggacacctggcttgagacatcgttaattagccaacggcacatcaggccaagttgccctaccgcacgtaatgtcagccccagctcatcgctgcgattcagatgctcaacactattacgttctccggtcgccaccttcagtgcctgatgggcaacattttctatcgggcgcacaatctgccattcaaaacaggcgcttgccaacaataccactaacgcacagaggatatacgtcaccaccggggcagcaacaaaccaaagcatggccgccagcaagataaacatcagggtcatcactccacgcgcccgccagcgaagcggtaatgaaggcagtttacccagccagcctttacgcaccaccaggcctttatgaatacgcttactggtacgtccggcgttcaacgctttgtacagcggctccaccgccgcgatctcttcatccgtcgcccgggtacgaatcgacatatagccactgatttttccctcgcgcaccatcggtaccgcattggcccgcacccaataatggtcaccatttttgcggcgatttttcacgatgccgctccagggctccccttttttcagggtgaaccacatatccgcaaacgccgcttttggcatatccgggtgacgcaccatgttgtgcggctgcccttgtaactcttgcaaggtatagccgctcacctgcacaaaagtgtcattagcatgagtgatatagctttgcagatcggtagtggacatcagagtggtatcgtccgccagcggggtattttgctgggtgacatacggatgagaagacatgttcgcgtcctgtgcaggttatatggttgttaacttcttgtcagagtttatgtcggccccgctgcggttatctttaaccgattaatttgatttagatcgcaatttgcgatttaaacacaaatctaattccttgatttaaaatactttcactctgttactatacgaaaacgttaattatcttgcccaaaaatcaggcaattattgccctgaaaacgtgcatttgcgcagcaatcatcaaatccatacccgacaaaaaccgtgcaaaataacaacaaatgttaacagatagcattaaatattgcacaaatgataaccgaatttgtgtttatcccgattttcgcgatcgcagccggagtggcgcaatccctgcaatacttaaatcggtatcatgtgatacgcgagcctccggagcatattttgaacaggttaccttcgagcgcatcggctttagcgtgcagcgcccacgccctgaatctcattgagaagcgaacgctggatcatgaggagatgaaagcacttaaccgagaggtgattgaatacttcaaagagcatgtcaatccggggtttttagagtatcgcaaatctgttaccgccggcggggattacggagccgtagagtggcaagcgggaagtttaaatacgcttgtcgacacccagggccaggagtttatcgactgcctgggaggttttggaattttcaacgtggggcaccgtaatccagttgtggtttccgccgtacagaatcaacttgcgaaacaaccgctgcacagccaggagctgctcgatccgttacgggcgatgttggcgaaaacccttgctgcgctaacgcccggtaaactgaaatacagcttcttctgtaatagcggcaccgagtccgttgaagcagcgctgaagctggcgaaagcttaccagtcaccgcgcggcaagtttacttttattgccaccagcggcgcgttccacggtaaatcacttggcgcgctgtcggccacggcgaaatcgaccttccgcaaaccgtttatgccgttactgccgggcttccgtcatgtgccgtttggcaatatcgaagccatgcgcacggctcttaacgagtgcaaaaaaaccggtgatgatgtggctgcggtgatcctcgaaccgattcagggtgaaggtggcgtaattctgccgccgccgggctatctcaccgccgtacgtaagctatgcgatgagttcggcgcactgatgatcctcgatgaagtacaaacgggcatggggcgcacgggcaagatgttcgcctgcgagcatgagaacgtacagccggatatcctctgccttgccaaagcgctcggcggcggcgtgatgccgattggcgcgaccatcgccactgaagaggtgttttcagttctgttcgacaacccattcctgcataccaccacctttggcggcaacccgctggcctgtgcggcggcgctggcgaccatcaatgtgttgctggagcagaacttaccggctcaggctgagcaaaaaggcgatatgttgctggacggtttccgtcaactggcgcgggaatatcccgatctggtacaggaagcgcgtggtaaagggatgttgatggcgattgagtttgttgataacgaaatcggctataactttgccagcgagatgttccgccagcgcgtactggtggccggaacgctcaataacgccaaaacgatccgcattgaaccgccactgacactgaccattgaacagtgtgaactggtgatcaaagcggcgcgtaaggcgctggcggccatgcgagtaagtgtcgaagaagcgtaatatcaaatcggatggcgatacgacgtcgccatccgatctttttatacgacgcgtacgcccgcaggcatcatccgctccggcgttaacagcacgctttcactgccgtcatcggtttccgcacacaacagcatgcattccgacgtttcaccacgcattttcgctttttgcagattgcataagaccaccaccgttttccccatcagctcttcttcgctgtagtacggcaccaggctggtcacggtttgcagcgttttttgccccacatcaacctgtacgatgtacagcttgtcggcgttttcatggcgtttcacttccacaatctttccgacgcgcatttccagacgtgcaaaatcagcgtaagccacggtttccattgcttcctcccttagggtaaaattttactaaactatagcaaaagtttttctcaatcctgtaggctaaaaatggagaatgcaggcgtgatcacattcgtgagccgctgtgttaccgttacagcgtcaaagaaacgcgctttatttactgaaaacaggtgacccgataagcacttcctctacaatgggggcgcacatcagggaaagtaaaaaaggtaaacatggcaacactaaaagacatcgcaatcgaagctggcgtatccctggcgacagtatccagggtcttaaatgacgatccgacattgaatgtgaaagaagagacgaaacatcgcattctcgagatcgccgaaaagctggagtacaagaccagtagtgcccgtaaactccagacaggtgcagtcaaccaacaccatattctggctatctacagctaccagcaggagctggagatcaacgatccttactatctggcgatccgccacggcattgaaacccagtgcgaaaagctgggcatcgagctcaccaactgttatgaacacagcggcttaccagacattaaaaacgtcaccggtattttaattgtcggcaaacccacgcccgccctgcgcgccgctgccagcgcgttgaccgacaatatctgttttatcgactttcacgaacccggcagcggttacgatgcggtggatatcgatctggcacgcatcagtaaagaaatcatcgacttctatatcaaccagggcgttaatcgtattggttttattggcggtgaagatgagcctggcaaggcggatattcgtgaggtcgcctttgcggaatatggccgactgaaacaagtggtacgcgaagaggatatctggcgcggcggtttttccagttcgtcgggttatgaactggcaaaacaaatgctggcgcgggaagactatccgaaggcactgtttgttgcttccgattccattgctatcggcgtactgcgggcaattcatgaacgaggcctgaacatcccacaggatatttcgcttatcagcgttaacgatatccccaccgcgcgatttacctttccgccgctctccaccgtgcgcatccattccgagatgatgggaagtcagggcgttaacctggtgtatgaaaaagcccgcgatggtcgcgcgctgccgctgttagtcttcgttcccagcaaattaaaactgcgcggcacgacccgttaaatccccttacacactgtccggcaatcgtttttgccggacagtgctgccgtttattttcgtgatccagttaaagtaaatgcatttacctgctactttttagtaaaaattttactaaactccccagcaattacacaaactaccatcaccatgaatggttccgatttctctctaccgggaggccctatgaatcgctgggaaaacattcagctcacccacgaaaaccgacttgcgccgcgtgcgtactttttttcatatgattctgttgcgcaagcgcgtacctttgcccgcgaaaccagcagcctgtttctgcccttaagcggtcagtggaatttccacttttttgaccatccgctgcaagtaccagaagccttcacctctgagttaatggctgactgggggcatattaccgtccccgccatgtggcaaatggaaggtcacggcaaactgcaatataccgacgaaggttttccgttccccatcgatgtgccgtttgtccccagcgataacccaaccggtgcctatcaacgtattttcaccctcagcgacggctggcagggtaaacagacgctgattaaatttgacggcgtcgaaacctattttgaagtctatgttaacggtcagtatgtgggtttcagcaagggcagtcgcctgaccgcagagtttgacatcagcgcgatggttaaaaccggcgacaacctgttgtgtgtgcgcgtgatgcagtgggcggactctacctacgtggaagaccaggatatgtggtggtcagcggggatcttccgcgatgtttatctggtcggaaaacacctaacgcatattaacgatttcactgtgcgtaccgactttgacgaagcctattgcgatgccacgctttcctgcgaagtggtgctggaaaatctcgccgcctcccctgtcgtcacgacgctggaatataccctgtttgatggcgaacgcgtggtgcacagcagcgccattgatcatttggcaattgaaaaactgaccagcgccagctttgcttttactgtcgaacagccgcagcaatggtcagcagaatccccttatctttaccatctggtcatgacgctgaaagacgccaacggcaacgttctggaagtggtgccacaacgcgttggcttccgtgatatcaaagtgcgcgacggtctgttctggatcaataaccgttatgtgatgctgcacggcgtcaaccgtcacgacaacgatcatcgcaaaggccgcgccgttggaatggatcgcgtcgagaaagatctccagttgatgaagcagcacaatatcaactccgtgcgtaccgctcactacccgaacgatccgcgtttttacgaactgtgtgatatctacggcctgtttgtgatggcggaaaccgacgtcgaatcgcacggctttgctaatgtcggcgatattagccgtattaccgacgatccgcagtgggaaaaagtctacgtcgagcgcattgttcgccatatccacgcgcagaaaaaccatccgtcgatcatcatctggtcgctgggcaatgaatccggctatggctgtaacatccgcgcgatgtaccatgcggcgaaagcgctggatgacacgcgactggtgcattacgaagaagatcgcgatgctgaagtggtcgatattatttccaccatgtacacccgcgtgccgctgatgaatgagtttggtgaatacccgcatccgaagccgcgcatcatctgtgaatatgctcatgcgatggggaacggaccgggcgggctgacggagtaccagaacgtcttctataagcacgattgcattcagggtcattatgtctgggagtggtgcgaccacgggatccaggcacaggacgaccacggcaatgtctggtataaattcggcggcgactacggcgactatcccaacaactataacttctgtcttgatggtttgatctattccgatcagacgccgggaccgggcctgaaagagtacaaacaggttatcgcgccggtaaaaatccacgcgcgggatctgactcgcggcgagttgaaagtcgaaaataaactgtggtttaccacgcttgatgactacaccctgcacgcagaggtgcgcgccgaaggtgaaacgctcgcgacgcagcagattaaactgcgcgacgttgcgccgaacagcgaagcccccttgcagatcacgctgccgcagctggacgcccgcgaagcgttcctcaacattacggtgaccaaagattcccgcacccgctacagcgaagccggacaccctatcgccacttatcagttcccgctgaaggaaaacaccgcgcagccagtgcctttcgcaccaaataatgcgcgtccgctgacgctggaagacgatcgtttgagctgcaccgttcgcggctacaacttcgcgatcaccttctcaaaaatgagtggcaaaccgacatcctggcaggtgaatggcgaatcgctgctgactcgcgagccaaagatcaacttcttcaagccgatgatcgacaaccacaagcaggagtacgaagggctgtggcaaccgaatcatttgcagatcatgcaggaacatctgcgcgactttgccgtagaacagagcgatggtgaagtgctgatcatcagccgcacagttattgccccgccggtgtttgacttcgggatgcgctgcacctacatctggcgcatcgctgccgatggccaggttaacgtggcgctttccggcgagcgttacggcgactatccgcacatcattccgtgcatcggtttcaccatgggaattaacggcgaatacgatcaggtggcgtattacggtcgtggaccgggcgaaaactacgccgacagccagcaggctaacatcatcgatatctggcgcagcaccgtcgatgccatgttcgagaactatcccttcccgcagaacaacggtaaccgtcagcatgtccgctggacggcactgactaaccgccacggtaacggtctgctggtggttccgcagcgcccaattaacttcagcgcctggcactatacccaggaaaacatccacgctgcccagcactgtaacgagctgcagcgcagtgatgacatcaccctgaacctcgatcaccagctgcttggcctcggctccaactcctggggcagcgaggtgctggactcctggcgcgtctggttccgtgacttcagctacggctttacgttgctgccggtttctggcggagaagctaccgcgcaaagcctggcgtcgtatgagttcggcgcagggttcttttccacgaatttgcacagcgagaataagcaatgaggatcatcgataacttagaacagttccgccagatttacgcctctggcaagaagtggcaacgctgcgttgaagcgattgaaaatatcgacaacattcagcctggcgtcgcccactccatcggtgactcattgacttaccgcgtggagacagactccgcgaccgatgcgctatttaccgggcatcgacgctattttgaagtgcattactacctgcaagggcagcaaaaaattgaatatgcgccgaaagagacattacaggtagtggaatattatcgtgatgaaactgaccgtgaatatttaaaaggctgcggagaaaccgttgaggtccacgaagggcaaatcgttatttgcgatatccatgaagcgtatcggtttatctgcaataacgcggtcaaaaaagtggttctcaaagtcaccatcgaagatggttatttccataacaaataacaactacggcggcaaaaggagtttgccgccaccgctaccctactcattttcggagatgtgttatgtctgataccaaacgtaatacaatcggcaaattcggcttgctctcgctgacttttgccgccgtttacagctttaacaacgttatcaataataatattgagcttggactggcctcggcaccgatgtttttcctcgcgacgattttttattttattcccttctgtctgatcatcgcagaatttgtttcgttaaataaaaactcagaagccggtgtctacgcgtgggtaaaaagttcgctgggcggacgttgggcatttattactgcctatacctactggttcgtaaacctgttctttttcacctcactgttgccgcgcgttattgcttatgcttcgtatgccttcctcggatacgaatatattatgacgccggttgccaccaccattatcagtatggtgctgttcgccttctccacctgggtttccaccaacggggcgaaaatgttggggccaattacctccgtcacttcaacgctgatgctgctgttaacgctctcctacattttactggcaggtacggcgctggttggcggcgtacagcctgctgacgccatcaccgttgacgcgatgatcccgaacttcaactgggcgttcctcggcgttaccacctggatctttatggccgcaggtggcgcggagtccgtcgctgtgtacgttaacgacgtcaaaggcggttcgaaatcgttcgttaaagtgatcatcctcgccgggatttttatcggcgtactgtattccgtctcctcggtgctgattaacgtcttcgtcagcagcaaagagttgaaatttaccggcggatcggtgcaggtattccacggcatggcggcgtattttggtctaccggaagcgttgatgaatcgctttgtcggtctggtgtcctttaccgcgatgttcggttccctgctgatgtggaccgcaacgccggtgaaaattttcttctccgaaatcccggaaggcatctttggtaagaaaaccgtcgaactgaacgaaaacggcgttccggcgcgcgcagcgtggatccagttcctgatcgtcatcccgctgatgattatcccgatgctcggttccaataccgtgcaggatctgatgaatactattattaatatgaccgccgcagcgtccatgcttccgccgttattcatcatgctggcttacctgaatttacgcgccaaattagatcacctgccacgcgatttccgtatgggctcccgccgcaccggtattatcgttgtttcaatgctgattgcgatatttgccgtagggtttgtcgcttcgacattcccgactggcgcgaatattctgaccatcattttttataacgtcggcggtattgttatcttccttggctttgcgtggtggaaatacagtaaatatataaagggattaacggctgaagagcgccatattgaagcgacgccagccagcaatgttgattaagcagaataataaaaaatgagcaggcattttccctcttcctggatgaggagagggaaaatagtttctgcctttatatttttataattacaacgataaaaggctgtactttttctttagctcatggattaacacaatgaaattaatcactgcaccatgcagagcattacttgctctgccgttttgctacgccttttctgcggcaggagaagaagcacgtccggcagaacatgacgacacaaaaacacccgcaattacctcgacatcttctccttcatttcgtttttacggcgaattaggggttggtggatatatggatttagagggtgagaataaacataaatacagcgacggtacctatattgaaggtggcctggagatgaagtacggctcctggttcggcctgatttacggcgaaggctggaccgtgcaggccgaccacgacggcaatgcctgggtgccagaccatagctggggtggtttcgagggcggaattaaccgtttctatggcggttatcgtaccaatgatggcaccgaaatcatgctcagtctgcgtcaggattcctcgctggatgacctgcaatggtggggcgatttcacccccgatctgggctacgtcattcccaatacccgcgacattatgactgcgctgaaggtacagaacttaagcggcaactttcgttatagcgtcaccgcgactcctgccggacatcatgatgaaagcaaagcctggctacattttggcaaatacgatcgctatgacgacaaatacacctatccggcaatgatgaacggttacatccagtatgaccttgccgaaggcatcacctggatgaacggtctggaaatcaccgacggcacaggacagctctatctcacgggcctgctaactcctaactttgccgctcgcgcctggcaccataccggacgcgccgacgggctggacgtaccgggaagtgaaagtgggatgatggtgagcgccatgtatgaagcgttaaagggcgtttatctctccaccgcttacacctacgccaaacatcgccctgaccacgctgacgatgaaaccacctctttcatgcagtttggtatctggtacgaatacggcggcggacgtttcgccacggcttttgatagccgcttctacatgaaaaatgcctctcacgatcccagcgaccaaatcttcctgatgcaatatttctactggtaataaggactgtaatttcatgaaaataaaaactattttaacgccagtaacctgcgctctgctgataagtttttccgcccatgccgctaacgccgacaattataaaaacgtgattaaccgtactggcgcgccgcagtacatgaaggattacgattacgacgatcaccagcgttttaatccgtttttcgatctcggagcctggcatggtcatctgttgccagacggccctaacaccatgggcggctttccgggcgttgcgctgctgacggaagagtacatcaactttatggccagcaatttcgaccgcctgaccgtctggcaggacggcaagaaagtcgactttacgctggaggcatacagtattcccggtgcgctggtgcaaaaactgacagcaaaagatgtgcaagtcgaaatgactctgcgcttcgccacgccgcgcacgtcactactggaaaccaaaatcaccagcaataaaccgctggatctggtgtgggacggcgaactgctggaaaaactggaagcgaaagaagggaaaccgctttccgataaaaccattgctggcgaataccctgactatcagcgcaaaatcagcgccacccgtgatggcctgaaagtcacctttggcaaagtgcgcgccacctgggatctgctgacctccggcgaatcggaatatcaggtgcataaatccctgccggtgcagactgaaatcaacggtaatcgctttaccagtaaggcgcatatcaacggttcgaccacgctctacaccacctattcccatctgctgaccgctcaggaagttagcaaagagcaaatgcagatccgcgatattctggcgcgtccggcgttttatctcaccgcctcgcagcaacgctgggaagaatacctgaagaaagggttaaccaatccggatgcgacgccggaacagacgcgcgtcgcggtgaaagcgatcgaaacgctcaacggtaactggcgctcaccgggcggtgcggtgaaatttaacaccgttacaccgtcggtgaccgggcgctggttctccggcaatcagacctggccgtgggatacctggaagcaggcgtttgcgatggcgcatttcaatccggacatcgccaaagagaatatccgcgcggtcttctcctggcagatccagcctggcgatagcgtgcgtccgcaggatgtgggctttgtccccgacctgatagcgtggaaccttagccccgagcgtggtggcgatggcggcaactggaacgaacgtaataccaaacccagccttgccgcctggtcggtgatggaagtgtataacgtcacccaagataaaacctgggtggcagagatgtacccgaaactggtggcctatcacgactggtggttacgtaaccgcgatcacaacggcaacggcgtgccggaatatggcgcgacccgcgacaaagcccacaacactgagagcggcgagatgctgtttacggtgaaaaaaggcgataaagaagagacgcagtctgggctgaacaactacgcccgcgtggtggagaaaggccagtacgacagtctggaaattccggcacaggttgctgcatcgtgggaatcggggcgtgatgatgccgccgtctttgggtttatcgacaaagaacagttggataaatatgtcgctaatggcggcaaacgtagcgactggacggtgaaattcgccgaaaaccgcagtcaggacggaacgttgctgggctactcgctattgcaggagtcggtggatcaggccagctatatgtacagcgataaccattatctggcggagatggcaaccatcctcggtaagccagaagaggccaaacgctatcgccagttggcacagcagctcgcggactacatcaacacctgtatgttcgacccgactacccagttctactatgacgtacgtattgaagataaaccactggcgaacggctgcgcgggcaaaccgattgttgagcgcggtaaagggccggaaggctggtcgccgctgtttaacggtgcggcaacgcaggccaatgccgacgcggtggtgaaggtgatgctcgatcctaaagagttcaacacctttgtcccgctgggaacggcggcgttaaccaatccggcttttggcgctgatatctactggcgtgggcgcgtatgggtggatcagttctggtttggtctgaaagggatggagcgttacggttatcgtgatgatgccctgaagctggcggatacgttcttccggcacgccaaagggttaaccgccgatggaccaattcaggaaaattacaacccgctgacaggcgcacagcaaggcgcaccaaatttctcctggagtgccgcgcatttgtatatgttgtataacgattttttccgtaagcaataatttgcaactgctggcggatgcggcgtaaacgccttatccgccctacatgtgcaatcctcctggccggataaaacgcggcaagcgttgcatccggcaactgcaccgcgccactggcggatgcggcgtgaacgccttatccgccctacatgtgcgttcccgtaggtcggataagacgcgacaagcgtcgcatccggcatctgcaccgcgccactggcggatgcggcgtggacgccttatccgccctacatgtgcaattccgtaacctggataaaacgcgacaagcgtcgcatccggcgttatcaccgggcgtattctttttgaatcccatcacaaaccccgcactccccttttcccttttctccggcgacggctaaattagaactcatccgaccacataacaattattttacatactggacaattttatgagctacccgtcgctgttcgccccgctggatttaggttttaccacgttaaaaaaccgcgtgttgatgggctcaatgcacaccgggctggaggaatacccggacggtgccgagcggctggcagcgttttatgccgaacgcgcccgtcacggcgtggcgctgattgtcagcggcggcattgcaccagatttaacaggcgttggcatggaaggtggcgcaatgctcaacgacgccagccagatcccacaccatcgcaccattaccgaagcggtacatcaggaaggcggcaaaatagccctgcaaattttgcataccgggcgctacagctaccaaccgcatctggtcgccccgtccgcattgcaggcccccatcaaccgtttcgtgccccatgagttaagccatgaagagatcctgcaactgatcgacaatttcgcccgctgcgcgcaactggcgcgggaggcaggatacgacggtgtagaggtgatgggttccgaagggtatttgatcaacgaatttctgacgctgcgcaccaatcagcgtagtgaccagtggggcggcgattaccgcaaccggatgcgatttgccgtagaagtagtgcgtgcggtgcgcgaacgcgtcggcaacgacttcattattatctaccgactgtcgatgctcgacctggtcgaagacggcgggacttttgccgaaacggtagagctggcgcaggccattgaagcggcgggcgcgaccattatcaacaccggcattggctggcatgaagcacgtattccgaccattgccacgcccgtgccgcgcggcgcatttagctgggtcacgcgcaaactgaaaggccacgtctcgctgccgctggtaaccaccaaccggattaacgatccgcaggttgccgacgatattctctcgcgcggcgatgccgatatggtatcgatggcgcgaccgtttcttgctgatgcggagctgctgtcaaaagcgcaatcgggacgagccgatgagatcaacacttgtattggctgcaatcaggcctgtctcgatcaaatcttcgttggcaaagtcacctcgtgcctggtgaatcctcgcgcctgccacgaaaccaaaatgccaatccttcccgccgtgcagaaaaaaaatctggcggtggtcggtgcgggacctgctgggctggcgtttgccattaacgcggcggcgcgtgggcatcaggtaacattgtttgacgctcatagcgagattggcgggcagtttaatatcgccaaacagatccccggcaaagaggagttttacgaaacgctgcgctattaccgccggatgatcgaagtgacgggcgtgacgctaaaactcaatcacaccgtgacggcggatcagttacaggctttcgatgaaacgatcctcgccagtgggatcgtgccgcgcactccgcccatcgacgggatcgatcatccgaaggtattgagttatctcgatgtactgcgcgacaaagcgccggttggcaacaaagttgccatcatcggttgtggcgggattggttttgatacggcgatgtatttaagtcagccgggcgaatccaccagccagaatatcgccgggttctgtaatgaatgggggatcgacagtagcctacaacaggctggtggcttaagcccgcagggaatgcagatcccccgtagcccacggcagattgtgatgctccagcgcaaagccagcaaaccaggacaggggttaggcaaaaccaccggctggatccatcgcaccaccctgctctcgcggggtgtgaaaatgatcccaggcgtaagttatcagaagattgacgatgacgggctgcatgtggtgatcaacggcgaaacgcaggtattagcagtggacaatgtggtgatctgcgcagggcaagagccaaaccgcgcgctggcgcaaccgctgattgatagcgggaaaacggtgcatttaattggcggctgcgatgtggctatggagctggacgcacgacgggcaattgcccagggaacacggctggcgctggagatttaaatcgttatttgaagcgccggatgcaacgcatccggcacgtcgcgttaatcaataaacaaggcgggagaaatgccgaatcgcgttgccaattttttagcgtgttccagcgttaatttcctcttcccgctcaaaacgcgtgacaccatagatttactgccaatttccggcagatcggaaagggttaaaccatattgatccataagggtacgaatcacggctataccgccaggcatggcttgagccatggcattaaattccgcaaattcgggcgctgattcttcccacgcggttattttggcacacaccagatccagcaaggggttttcaggatcgttgagcagcagatgatctaccagttccagcgcctgggtgtattgttcctcgttctgaatacccgccagaaaaggtgccacagcagttagcttttctcctgcttgcaagatgtcggcaatcgcaatcattttttccccttagtacgatgaacagcggtaaagaaatcgtattctttatgcgtcataacttcacgtatgtagcacttttgcgattcaaaaaagaccattgctacaacacgtaattcattgcccccaacattgaaaacataatgcttatccagatatttgaagttatccagagatgggaatactgcttttaatgactcaggttttttgaaatatcccttagcaatcgtgttccccagagccaccaactccgttttatgttgcgggtatttttccgcagcatctttcaatgctttttgagttatcaggtgcattcttcatcacgtccgttgacaaattggcaatatgataacatccgttgccagattggcaacggatgaatttatctgtgtgacggaagaataaacgtagaaaaacgctaaacaagagaatgtagacgatggtgacagggattttttgttttatggaagcgcgattccagaactgggcagacattgccggatgcgacgcttgccgcgtcttatccggcctggagtaacgtgctgaacgtaggccggataaggcgtttacgccgcatccggcaggtaactcccaatcttaccgacgacgtcccagcttcaccgctttcagtaccacaaatttattattcgtcgcaatagtggtgcagttgccgaaaatcttcttcagtttatggaagtaatccaggtgacggttggcaacgatatacagctcgccgttgattttcaggcagcggcgggcgtggtggaacatctcccaggcgacgttatcggtcagcgcatgttgttggtgaaacggcgggttgcagagcacagcattaaagcggaaaggctccacgccggagagcgcgttgttgatcataaactcgcagcgatccaacgcctctggcatgttggtttcaacgttcaaacggctggaagcaaccgccatcggcgattcatcgacaaacaccactttcgcctgcgggtttttatcaagcagcgtcagaccaataacgccattaccgcaaccgagatcgacaatctccccttcgagattctctggcagatgttgcataaagaagcgcgcgccgatatcaagcccggtgcgggagaagacattcgcatggttgtggatagtccagtcagtaccttccagcttccagctaacggtctgcggcgcatcggccagctgcggttcattgaaagtgcaattaatcaggcgcgcttttttccatgccagcgtggtggtggttgggccgagcactttttcgaacagttccagcgtggaagtgtgaatgtcacgggccttggcaccggcaataatacgtgtatccgacgtgaccactttgcgcagcgcacgcagttgctgttccagcaatgccagtgttttcggcactttgatcagcaccacacccggctgttgcgggtagtcggcggtgctgtcgagaaacttcacgctcgactcatcaatcccgttgaggcgtaaattctcgcgcgtcgccagttcactgatgtatgagtcgccaatgctgtacggcttatgttccgccagtgcgcagcttaacgcaccaaaggcatcattcaggatcaacaccgggccgcggatttctgtgtcgtccaactgttgcagcaaatattcatccgccgcttcccacgcctgtagcgggttaacgtcatccgtcgccggaaaacgttgtagtgtcagtgaacggaaaccgttgtctaagtggctcatcggccctcctgaatgataaaatttcgacattgcccctgaaaagggtgcgtgagtataccctttttctctttttcgtgggcggttatgagcaatcttacttatcttcagggttatcccgagcagctactttcccaggtgcgaacactgattaacgaacagcgtctgggcgatgtgctggcaaaacgctatccgggaacacacgactacgccaccgataaagccctctggcaatatactcaggatctgaaaaatcagtttctacgtaatgccccgccgatcaataaagtgatgtatgacaataagatccatgtgctaaaaaacgcgctcgggttacataccgctgtttctcgtgtgcagggcggcaagctgaaagcaaaggtggagatccgcgtcgctaccgtgtttcgcaacgcgccggaaccgtttttgcgcatgatagtggtgcacgagctggcgcacctgaaggagaaagagcataacaaagcgttttaccagttgtgttgtcatatggaaccccagtaccaccagcttgagttcgacacccgactgtggctaacgcagttgtcgcttgggcagaacaaaatctgaaaatgatgtcaggcgttatcttttctttctttagcgcctaaaatcgacctcccccctttcgttaaggataacgaccatgctgcgcgcatttgcccgccttcttctccgtatttgtttttctcgccggactctaaagattgcctgcttactgttacttgtggcaggagcgaccatccttatcgccgatcgcgtaatggtcaacgccagcaaacagctgacctggagcgatgtcaacgccgttccggcgcgtaacgtgggtttattgctgggggcgaggccgggtaatcgctactttacccgacgtattgataccgcagcagcgttgtaccacgccggaaaagtgaaatggctgctggtaagtggcgataacggacgtaaaaattacgatgaagcatcaggtatgcagcaggctttgatcgctaaaggcgtaccagcaaaagtgatcttctgcgactatgccggattctcaacgctggattcggtagtgcgtgccaaaaaggtttttggtgaaaaccatatcaccattatctcgcaagaatttcataatcaacgcgccatctggctggcaaaacagtacggcatcgacgctatcggttttaacgcgccagacctcaatatgaagcacggtttttatactcaactgcgggagaaactcgctcgtgtcagcgccgtgattgacgccaaaatcctccatcgccagccgaaatatctcgggccttcggtcatgattgggccgtttagtgagcatggctgtccggcgcagaaataatgcgtatctgcgcacgtcgaagatgaaaaaggcgtgctacattgacgacagaatccctttatggagtatccacgcgttatgatacgtttcgctgtgattggtacgaactggatcactcgccagttcgtcgaggccgcccatgagagcggtaaatacaagttaaccgccgtatattcccgcagccttgaacaggcccagcacttcgccaatgatttttctgtcgagcatctgtttacctcgctggaagcgatggcggaaagcgatgccattgacgcggtgtatattgccagcccgaattccctgcatttttcccagacacaacttttccttagccataaaattaatgtgatttgcgagaaaccgctggcgtcgaatctggcggaagtggatgccgccattgcctgtgcgcgggaaaatcaggtggtgctgtttgaggcatttaaaaccgcctgcctgccgaactttcatttgttgcgccaggcgctgccgaaagtcggcaaactgcggaaagtctttttcaactattgccagtattcctcgcggtatcaacgttacctggatggtgagaatcccaacacctttaatccggcattctctaacggttcaattatggatatcggtttttactgtctggcgtcggcggtggcgttatttggtgagccgaaaagcgtgcaggcaaccgccagtttgctggcaagcggcgttgacgcccagggcgtggtggtgatggattacggtgatttcagcgtcaccttgcagcactcaaaagtcagtgattctgtcctggcgagcgagattcagggcgaagcaggatcgctggtgattgaaaaactgtctgaatgccagaaagtgtgcttcgtgccgcgtggcagccaaatgcaggatctcacccagccgcagcatattaataccatgctctacgaagcagagctgttcgctaccctggtggatgagcatctggtggatcatccagggctggcggtcagtcgcatcaccgccaaactgctgaccgagatccgccgccagactggggtgatttttccggcagatagcgtaaaactataattgccaaagtaaaacagtgtaaaaggtatgtaacagaccattgactggctgaatggtctgtcatactttgttacctgcaaaggggagtaacttcattgccggtcgatcgtcattacgatgtgtgaaaaaacacatccggtcaccgggcaacccgaaaggaatacgcagacgtattccttttttgttgtaagtgagaccttgccggaaggcgaggtctatgcataaaaagcagcggctgacgtcttccgacgttggccgtttttttatgtgtaaggaacttctatgaatactgtcggcacgccgttgctatggggcggattcgctgttgttgtcgccattatgctggctatcgacctgttgttgcaggggcgtcgtggggcacatgccatgaccatgaaacaggctgcggcctggtcgctggtctgggtgacgctgtcgttactgtttaacgccgctttctggtggtatctggtgcaaaccgaaggtcgcgccgttgccgatccacaggcactggcctttctcacaggttatctgattgagaaatcgctggcggtcgataacgtctttgtctggctgatgttgttcagctatttctctgttccggcggcattacaacgccgcgtgctggtgtatggcgtgctcggggcgattgttctgcgtaccatcatgatcttcactggcagctggctaatttcgcagttcgactggatcctgtatatcttcggtgccttcctgctgtttaccggcgtgaagatggcgctcgcccatgaagatgaatcaggcattggcgacaagccgctggtgcgctggctacgcggtcatttgcgcatgaccgacaccatcgacaacgagcatttctttgtgcgtaagaatggattgctgtacgccacaccgctgatgctggtactgattctggtggaattgagcgacgtgattttcgccgtggatagcattccggctatcttcgccgtgaccactgacccgttcattgtgctgacctcaaacctgtttgcgatcctcggcctgcgtgcgatgtatttcctgctggcgggcgtagcagagcgtttctcgatgctcaaatatggcctggcggtgattctggtgtttatcggtatcaagatgctgattgtcgacttctaccatattccaatcgccgtctcgctgggcgtggtgtttggcattctggtgatgacgtttattatcaacgcctgggtgaattatcggcatgataagcagcggggtggataatttttaatctgcctaagccgtgtaccctgtcattaacatgagcaccgttttctccctctcccttccagggagagggtcggggtgagggtaatttttcgcaccgatgctggcctgttcccctcaccctaaccctctccccaaacggggcgaggggactgaccgagtccttttttgatgttgtcatcagtctggaagccgcacgttggctttatttttatgtcaaataaatgtaaccattaagtttcaaaatatgacctctctttaaaatccagcatttttcgcttcccgaagctgtaactttccttatactcgaccttgcaaacactttgttacatcctgaaagatgcgtcgacagaacgcaccagggatgtgcgacaacacaatgaaaggatcgaaaaatgactacgcaacgttcaccggggctattccggcgtctggctcatggcagcctggtaaaacaaatcctggtcggccttgttctggggattcttctggcatggatctcaaaacccgcggcggaagctgttggtctgttaggtactttgttcgtcggcgcactgaaagccgttgcccccatcctggtgttgatgctggtgatggcatctattgctaaccaccagcacgggcagaaaaccaatatccgccctattttgttcctctatctactgggcaccttctctgctgctctggccgcagtagtcttcagctttgccttcccttctaccctgcatttatccagtagcgcgggtgatatttcgccgccgtcaggcattgtcgaagtgatgcgcgggctggtaatgagcatggtttccaaccccatcgacgcgctgctgaaaggtaactacatcgggattctggtgtgggcgatcggcctcggcttcgcactgcgtcacggtaacgagaccaccaaaaacctggttaacgatatgtcgaatgccgttacctttatggtgaaactggtcattcgcttcgcaccgattggtatttttgggctggtttcttctaccctggcaaccaccggtttctccacactgtggggctacgcgcaactgctggtcgtgctggttggctgtatgttactggtggcgctggtggttaacccattgctggtgtggtggaaaattcgtcgtaacccgttcccgctggtgctgctgtgcctgcgcgaaagcggtgtgtatgccttcttcacccgcagctctgcagcgaacattccggtgaatatggcgctgtgtgaaaagctgaatctggatcgcgatacctattccgtttctattccgctgggagccaccatcaatatggcgggcgcagcaatcactattaccgtgttgacgctggctgcggttaatacgctgggtattccggtcgatctgcccacggcgctgctgttgagcgtggtggcttctctgtgtgcctgtggcgcatccggcgtggcgggggggtctctgctgctgatcccactggcctgtaatatgttcggtatttcgaacgatatcgccatgcaggtggttgccgtcggctttatcatcggcgtattgcaggactcttgcgaaaccgcgctgaactcttcaactgacgtgctgttcactgcggcagcttgccaggcagaagacgatcgtctggcaaatagcgccctgcgtaattaattgtttaacccctttcgtctacggcggaaggggttttctcaactttaaacggatcaattccccttttctgcatccgccagaaacgaatgatattcaggccattcataagcagaaaactaccctcaatcatcgtgccgcctatcgaccccgcccagaagttgtgaatcacccagcaacacgttgaaaaccacattacgcagcgcatggtcagccctttacagcggaatagcgcccaggtactgacaatcgtgccgataaccggcaatagttcgacaggatgatggaacttcgcgaggccaattccgccagtcagcacaataaaaatcgccattacccataagctgcgcgtgcgtaaggtaatcaatgtacgaatggcattaaggatggcactggcaccagcgggataggtgcccagaagaaaaaaatgtacgccaataacggcgctatagaccgaaagctgctttttgaagcgacgttcgtcacgattgaaaaatgttgtgataccaatcagaaaggcgatgacacccacgccctgggccagccaatacgcggtcatgataaatccttagcaggtatggaaaagcaaacggcgcttcacattatgaaacgccgttttttattaacaactcatttcgactttatagcgttacgccgcttttgaagatcgccagttcgcggaagtcgttacgctcgttacaggtttgcttaccgttggcaaactcaacgatggtgtcgataaattcttccagcaactgcggcatcgctttaccgtggatcaactgacccgcgtcaaagtcgatccagtgttttttcttcgccgccagttcactgttggtggcgattttcaccgtcggcacaaatccaccatacggcgtgccacgaccagtactgaacagcaccatatggcagcccgcacccgccagggcgctggtcgctacggcatcgttacccggcgcacttaacaagttcagccctggcgttttcagacgctcgccgtaacgcagcacgtcaaccacgacgctggaacccgctttctgggtacagccaagtgatttgtcttccagcgtggtgataccgcccgctttgttccccggcgatgggttttcatagatcggctgatcatgggcaataaagtactgtttgaagtcgttgaccatggtgaccagtttttcaaacgttgcttcgtcgcggcaatggtccatcagcaactgctctgcgccaaacatctccggcacttcggtcagtacggtagtaccgccgttagcaatcacgtagtcagagaaacgccccagcatcgggttagcagtaataccagaaagaccgtcagaaccaccgcactccagaccaaacttcagttcgctgagtttgcctggctcgcgtttatcgttgcgcatcacgttatacagctgatgcaaatgctcgattccggcttcgatctcatcatcctgctgttggcagatcatgaaatgaacgcgttcaggatcgatatcgcccagcgtttcacggaatgcggcaacctggttgttttcacagcccagaccaatcaccagcactgcgcctgcgttcgggtggcgcaccatgttttgcagcatggtgcgggtattaatgtgatcgtcgcccagctgtgagcagccgtaggtgtggctgaagaggaacacgccgtcagtaccttcggcgttgttggtctctttcagaaaacggttctggatctgccgcgcgatgccgttgacacagcccacggttggcaggatccacagctcattacgcaccccgacatcgccgttagcgcgacgatagatctgcacttcacgatctgccgcttgcgcaggcagatcctgaaaatcaggttgatagcgatactgatccagatcgctcagattcgtgcgcgtattgtgggcgtgaacgtgaacacctgccgcaatatccgccaatgcataaccaatcggcaggccatatttgatgacattggccccttttgcgatatccgttaacgcaaatttatgtccacgagcaacatcctggcgcagcgtaacagtctggttatcgacactgacttctgtgccttcagccaaatctgctaaagcgaccgcgacgttatccagcgcatggatcttgatgtattgcatatcaaccccagaccttagttcagttcaatggcgaagtagtcacgcgcattgttaaagcaaatatttttcaccatctcgcccagcaggttgatgtccgccggtgcttcgcccgcttccacccagcgaccgatcatctggcacagaatgcggcggaagtattcgtgacgggtgtatgacaggaagctacggctgtcagtcagcataccgacaaagcggctcagcagaccgagctgcgccagttgggtcatctgacgttccataccgtctttctgatcgttaaaccaccagccggaaccgaactgcattttgcccggcataccttcgccctggaagttaccgatcatggtgcccagcacttcgttatcgcgcgggttcaggcagtacagaatggttttcggcagcaggttttcttcattctgcttgctcagcaacttagacagctcttccgccatcggacggtcgttgatggagtcaaagcctacatccggccccagcagtttgaactgacgcaggttgttattacgcagcgcgccaatgtggtactgctgtacccagccgcgacgtgcatattcggcaccaaggaacaccagtaccgcagttttgaactgcgccacttcgtgctcgctcagggtttcgccagccagacggcgcgccagaatgctgtccagttccgcttcgttcgcttcagcaaacatcaccacatccagcgcgtggtcagacactttacagccgtgagcggcgaagtgatccagacgtttggtcagggcagtttgcaggtcagcaaagcggcgaatgtcggtatcggaaacttcgcccagcttcgccatgtagtcgttaaaggtcgcctgttcgatgttgaaggctttgtccggacgccagctcggcagcactttgatggtgaaagagccgtctttggcgatctctgcgtgatgctccagagaatcgatcgggtcatcggtggtgccgaccattttcacgttcatctgctgcatgatgccgcgcgcggagaagttatcctgcgccagcagttcgttacattcgttccagatttcatcggcagttgacggagaaagcaatttgccagtgataccaaacggacggcgcagttcgaggtgcgtccagtggtataacgggttgccgatagtgtgcggaacagtcgccgcccaggcgtcaaatttttcacggtcagacgcatcaccggtacacagacgctcggccacaccgttggtacgcatagcgcgccatttgtagtgatcgcctttcagccagatgtcatacaggtttttaaaacgatagtcttccgcaatctgctgcggcggcaaatggcaatggtaatcgaaaatcggctggtcttttgcgtagtcgtgatacagacggcgggcaaattcggtatctaacaggaaatcttcagtcataaacggagtcattttcgtcttcctctcaacgagtgagctagcttgcttatggtgcgatgctgacaaagttatcacaccaatttccagagtccgaagatattttcgtgagttagatcaataaacgtagttaaaaaaattactctcaaagtggtaaatctcgctgcaggccgcgccagtactggccttgctgtcgtcaggtaatgtccctacaaatattcccacatttgtgatggctctcaccttttaaagttgtatgacaagttatctttctgccgtcgcaaatcataagtcgacggaatgcaaattgccgattcattcatttgttagatgaatcgggttaaccggtacggaagccgaattagcacgaaactttcatggcaacgttcggggcgtgccggttttttttcggttacccggtcgtaactaacatcttcagcctctggcgggatgatggccgcgcttcctgcggatataacaaaacgatgaggttttacatgcgtaaaattaaagggttacgttggtatatgatcgcactggtgacgctcggcaccgtgcttggttacctgacgcgtaacactgtggcggcagctgcgccaactctgatggaagagttaaacatctccacccaacagtattcctatatcatcgcagcctattctgctgcttatacggtcatgcaaccggtagcaggttatgtactggatgtgctgggtacgaaaatcggttatgcaatgtttgctgtgctgtgggccgtgttctgtggtgcaaccgcgctggcaggtagctggggtggcctggctgttgctcgtggtgcggtcggtgccgcggaagcagcgatgatcccggcgggtctgaaagccagctccgaatggttcccggcgaaagagcgttccatcgcagtaggctactttaacgtaggttcttcgattggtgcgatgattgcgccgccgctggtggtatgggcaatcgtaatgcacagctggcagatggcatttatcatctccggtgcattgagctttatctgggcgatggcatggctgattttctataaacatccgcgcgaccagaagcatctgaccgatgaagaacgcgactatattattaatggtcaggaagcccagcaccaggtgagcacggcgaagaaaatgtccgttggtcagatcctgcgtaaccgtcagttctggggtatcgcgctgccgcgtttcctggcagaaccggcctggggtacttttaacgcgtggatcccgctgttcatgtttaaagtttacggctttaacctgaaagagatcgcgatgttcgcctggatgccgatgctgtttgctgacctcggttgtatcctcggtggttacctgccgccgctgttccagcgttggtttggtgtgaacctgatcgtttcccgtaagatggtcgtaacgctgggtgcagtgctgatgattggcccgggtatgatcggcctgttcaccaacccgtatgtcgcaattatgctgctgtgtatcggtggttttgcccaccaggcactgtctggcgcgctgattacgctctcttccgatgtgtttggtcgtaacgaagtggcaacggcaaacggtttaaccgggatgtccgcatggctggcaagtacgctgtttgcgctggttgtcggtgcactggctgacaccatcggcttcagcccgctgttcgcagttctggcagtgttcgacctgttaggtgcgctggttatctggaccgtgttgcagaacaaaccggcgattgaggtggcgcaggaaacacataacgatcccgcaccgcaacattaacgtttcgtgtaagttttagtttcccttcaaagccgccttctcaggcggctttttcatcactgcgagtagagctaaactcgcaaaagtggtataacaaatatagtctgccgtatcatgcctggagcgcatatggaaatcactgaaccacgccgtttgtatcaacaacttgccgctgacctgaaagagcgcatcgaacagggcgtctatctggtgggtgataaactgcctgcagaacgctttattgccgatgaaaagaacgtcagccgtacggtagttcgtgaagccatcatcatgctggaagttgaaggctatgtcgaagtgcgtaaaggttcaggtattcatgtggtttccaaccagccgcgccatcagcaggcggctgacaataatatggaattcgccaattacggtccgtttgagttgcttcaggctcgccagctcatcgaaagtaatattgccgaattcgcggcaactcaggtaacgaaacaggacatcatgaaactgatggccattcaggaacaggcgcgcggcgaacaatgcttccgtgattccgagtgggatttgcagttccacattcaggtcgctctggcgacgcagaactccgccctggcggctatcgtggaaaaaatgtggacccagcgtagtcataacccgtactggaaaaaactgcacgaacacattgattcccgtaccgtcgataactggtgtgatgaccacgatcaaatcctcaaggcgctgattcgcaaagatcctcatgctgctaagctggcaatgtggcagcatctggaaaacaccaagatcatgttatttaacgaaaccagcgacgacttcgagttcaatgccgaccgctatctattcgccgaaaacccggtggtgcatctcgatacagccaccagcggcagtaaatgaaattcctgtccgacaggcgctgcaatgcgcctgtttgtctcgtcggtaagcgaaaagtataaagtgtcagcctgtgtaaatcctctcgccaccctcccctgcattcagcaaaatcagactccacggacatgtaattttgataacgaacaacgttgacctttgttacaattagattcaatttgaatttatgtttttgaatgctttcttatctcacgatttaacagggaatagttcaggctgtgttgatgtatcaaacccgcagaacataccaaaacagcaataacattgcggtagtgcatcttttaaaaccagcgtggcgttaaccgattcaccaggaataatgaatggaacttttgacccaattgctgcaagccctgtgggcgcaggattttgaaaccctggccaatccatcgatgattggcatgttgtattttgtcttgtttgtaattttgttccttgaaaacggcttgcttccggcggcctttttaccgggcgacagtttactggtattggtcggcgtgttgattgcgaaaggcgcgatgggctatccgcaaacgattctgctgctgaccgttgccgccagcctcggctgctgggtcagctatattcaggggcgatggctgggcaatacccgcaccgtacaaaactggctatctcatttacccgcgcattatcatcaacgcgcacaccatctttttcataaacacggtttatcggcgctgttaattggtcgctttattgcgtttgtcagaacactgctgccgacgattgccgggttatcagggctgaataacgcgcgctttcagtttttcaactggatgagcggtctgctgtgggtattgatcctgacaactctgggttacatgctcggcaaaacgccggtatttttaaagtacgaggaccagctgatgtcatgcctgatgctgctcccggtggtgctgctggtgtttggcctggcaggttctctggtcgtgttatggaaaaagaaatatggaaatcgggggtaagggatgcaaatacctcgcatgtcgcttcgccagctagcctggtccggcgctgttttacttctggtcggcacgctgttgctggcctggtccgcggttcgccagcaagagtctacgctggcgattcgtgccgttcatcaaggcacaacgatgccagacggtttttcaatctggcatcaccttgacgctcatggcattcctttcaaaagtatcacccccaaaaacgacactctgttaattacatttgactccagcgaccagagcgccgccgcaaaagcggtcctcgacagaacattgccccatggctacatcattgcgcagcaggacaataacagtcaggctatgcagtggctgacccggttacgggataactctcatcgcttcggataacttcctgttatccgaaacatatcactcactttggtgatttcaccgtaactgtctatgattaatgaggcggtggttaacactaccgcttcgttgtctggacaatcgttcctttgtaataggtccgaatcacaatggaaggttcaagaatgaaataccgcatcgctttagctgtttctctctttgctcttagtgccggtagttatgccactaccctgtgtcaggaaaaggagcaaaatatccttaaggagatcagctatgccgaaaaacaccaaaaccagaatcgtattgacggtctgaataaagccctgagtgaagtccgggccaactgttcagatagccagctgcgtgccgatcatcagaagaaaatcgcaaagcagaaagatgaggtggcggaacgccagcaagatttagccgaggcgaagcaaaaaggcgatgccgataagattgccaaacgcgaacggaaactggcagaagcgcaggaagagctgaaaaagctggaagcgcgcgactactaactcacaatagtcactacttactcacctggagaaaactatgtcgaaagaacacactacggaacatctgcgtgctgagttgaaatccctttccgatacgctggaagaggtgcttagctcatctggcgagaagtcgaaagaagagttgagtaagattcgtagcaaagcggagcaggcactgaaacagagccgttatcgcctgggtgaaaccggtgatgccattgccaaacaaacccgtgtcgcggcggcgcgtgccgatgagtatgtgcgcgaaaatccgtggacgggcgtgggcattggcgctgcaatcggtgtagtgctcggcgttctgctgtcgcgtcgttaattatggcggacactcatcacgcacaagggcccggtaaaagcgttctgggcatcgggcagcgaattgtttctatcatggttgaaatggtagagacacgtctgcggctggcggtggtggagctggaagaggaaaaagcgaatctctttcaacttttactgatgctgggcctgacgatgcttttcgctgcatttggtcttatgagcctgatggtgctaattatttgggcggttgacccgcaatatcgcctgaatgcgatgattgccaccaccgtggtgttgctgctactggcactgattggcggtatctggacgctacgtaaatcgcgtaagtctacgttgctgcgccatacacgccatgagttagcaaacgatcggcagctgctcgaggaggagtcccgtgagcagtaaagtcgaacgtgaacgacgtaaggcgcaactgcttagccagatccagcaacaacggctggatctttccgccagtcgtcgtgaatggctggagacaacaggcgcttacgatcgtcgctggaatatgctgctaagtctgcgctcctgggcgctggttggcagtagcgtgatggcgatctggacgattcgccatcctaatatgctggtccgctgggccagacgcggttttggcgtatggagcgcctggcgtctggttaaaacgaccctcaagcagcaacagcttcgcggttaacttccctctggccggagccattccggccttatccctcaaattttttgaagatttttgacagttttccttgctaacaatcatcattcaccacgtttatgattctctccatcgacagcaacgacgctaataccgcgccattgcacaaaaaaacaatcagcagcctgagtggcgcagtggagagtatgatgaaaaaattagaagatgttggtgtactggtagcgcgcattttaatgccgattctgtttattaccgctggctggggaaaaattactggctacgcgggtacccaacaatatatggaagcaatgggcgtcccgggttttatgctgccgctggtgattctgcttgagtttggtggtggtctggcaatcctgttcggtttcctgactcgcaccacagccctgtttactgcgggctttacgctgctgacggcatttttatttcacagcaactttgctgaaggcgtcaactcgctgatgttcatgaaaaacctgacaatttctggcggattcctgctgctggcaattaccggtccgggcgcgtatagcatcgaccgcctgctgaataaaaagtggtaagcacgcgctatacttaacgataaaaaacgaggaggaagctcctcgtttttgctattggaggagagaaaaatgggtcaactgattgacggcgtctggcatgacacctggtacgataccaaatctaccggcggtaaatttcaacgttcagcttccgcatttcgtaactggctcactgccgatggcgctcctggccccactggcacaggcggttttatcgcagagaaagatcgttatcatctctatgtttcactcgcctgcccgtgggcgcaccgcacgctgatcatgcgcaaactcaaaggactggaaccgtttatttccgtttccgtagtgaacccgctgatgctggaaaacggttggacctttgatgacagttttccgggagcaaccggagacacgctctatcaaaatgaatttctgtatcagctttatctccacgccgatccacactacagcggacgagttactgttcccgtgctgtgggacaaaaagaaccacaccatcgtcagcaacgaatcagcagaaatcatccgcatgttcaataccgcgtttgatgcgctgggcgcgaaagcgggtgattactaccctccagccctgcaaacaaaaattgacgaacttaacggctggatttatgacaccgttaacaacggcgtgtataaagctggttttgccaccagccaggaagcttacgacgaggcggtggcgaaagtgtttgaatcgctggcacgactggagcagattttaggccagcatcgttacctgaccggcaaccagctaaccgaagccgatattcgcctgtggactacgctggtgcgttttgatccggtgtatgtgacccacttcaagtgtgataagcaccgcatcagcgattacctgaatctgtacggttttctgcgcgatatctaccagatgccggggatcgccgaaacagtcaatttcgatcatatccgtaatcattacttccgcagccataagaccatcaaccctacggggattatttcaattggtccgtggcaggatctcgatgaaccgcatggacgagatgttcgcttcggttaaaaaaaggcaccttacgaggtgcctctgataattagctaagtgcatgttgttcatgtcggatgtggcatgaacgccttatctgacatacaaaacattgtacattcaatagattgcataacccgcgcagaccagataagcgtagcgcatctggcgattttgcgcttgtcatcagtcttagcgcgccttcacggcactttattaattccttgaacgaatatttactgccatttcattcacgtctattcttaatttgctgctttaaaaacaagtgattgagcaaaattgaggcaaaaatggactggtatctgaaagtactaaaaaattatgtcggtttccggggtcgtgcgcggcgcaaagagtactggatgtttattctggtcaacatcatctttacgttcgtgctggggctgctggataaaatgttaggctggcaacgcgctggtggcgaaggcatcctgacgacaatctacggtattctggtgtttttaccgtggtgggcggttcagttccgccgcctgcacgacaccgaccgctcggcgtggtgggcactgctattcttaatcccgtttatcggctggcttattatcatcgtctttaactgccaggcgggtacgccaggcgaaaaccgctttggaccagatccaaaactggaaccttaaaacaaatctgctcgccggatgtctgactcatccggcttttatcattatgttgatgaatgaataatttactaatatttatttaaaatatttcaatgtcgctatataaattacctataaaaaataaccatgtatttatcttaaatatcaaaacctttataacatccgaaaaagaaagatacgaatagcatttacacaatacccggaatagactttcgtcacttttaattaaagggatgtttttatgcagtggtatttgtccgtattaaaaaattatgttggtttctctggtcgcgcacgtcgtaaagagtactggatgtttactctgattaacgccatcgtcggcgctattatcaatgtcattcaattgattttaggtctggagcttccatatctgtctatgctttatttgctggcaaccttccttcccgtccttgcgcttgctatccgtcgcttacacgataccgaccgttcaggtgcctgggccttgctcttttttgttccgtttattggctggctcgtgcttctggtttttttctgcacagaaggtacttctggcagcaatcgttacggaaacgatccgaagtttggttcaaattaatcttagaattggggcgatatttcgcccctttttattaacaataataaatattattttccgttaaaaagtttgggaatttcccgcagacaccaggatttcgcttcccccatactgtcacgacgccaggccataataatatcgatctcgctggtcgattccgggctgacgacacgcaaccgcccttccgcaatatctttttcgaccataggatacggcatcgtcgccacgccaagccccgccagtaatgcctgacgtttatcttcaatcgtgctcaccgttaagcgcggctgtttgtccagcagctgtacggtcaacaccgggcgctcacgagcggtatccgccaccgcaattccacgatatttcacacgcgtcacttcagataacggttccggctcctgatgaatcgggtgatcaggcgcggcaacgtagacgttcattaacgtatagagcttgcgcgagttgatctccgacgaggaacgaaaatgcatatccggcgcgataacaatatccgcccgcccctgctccagccgttcccacgcccccgccagcacttctgtgatgattgccagttgggtattggcttttgccgccagtttgtcgattaacgggaaaaaggcaggtgtcggtaccagcgcttcggtcacaatggtgagatgcgtttcccaaccgcgcgcgagagcttccgcatcagtagtcagtttatctgcggcttccagcaaaacgcgccctcgctccaacaacatcctcccgacattggtgaatttggtacgatggcccgagcggtcaaacagcaccacatccagctcttcttccagtttttgcatggtgtagctaagtgcggaaggcacgcgtcccagctcatccgccgccgccgcaaaactgccccggcgatcgatcgcatccataacccgtagtgcttccagcgttaatgccctttctttggccatttcgttctcattcaggaaatttgaacataccgggcagaatatctggctaacaatgtagcgtccagccccttaccataaaaggaagtaaagagaggtcaagaattatgattactacccgaactgccaggcagtgtggacaagcagactacggatggttgcaggcccggtatactttttcctttggacactacttcgacccgaaattgttaggctatgcctccctgcgtgtgcttaaccaggaagtgctggccccaggtgccgcctttcagccgcgaacctatcccaaagtcgatattttaaatgtgattctggatggagaagcagagtatcgcgatagcgaaggcaatcatgttcaggccagcgccggagaggcgttgctgctctctacccagccgggtgtcagctatagcgaacacaatctcagcaaaaacaaaccgttaacgcgaatgcagctttggctggacgcctgcccgcagcgagagaatccgctgattcaaaagctggcgcttaatatgggcaagcagcaattaatcgcctcgccagagggtgcgatgggaagcctgcaattacgccagcaagtgtggctgcaccatatcgtgctcgacaaaggcgaaagtgcgaatttccagttgcatgggccacgcgcgtatttgcaatcgattcacgggaaatttcatgcgcttacgcatcatgaagagaaagcggcgctgacctgcggtgatggggcgtttattcgtgacgaggctaacattacgctggttgccgattccccactgcgcgctttgctgatagatttgcctgtctagttgtttttacagggagatgatgatgagtaaaaaattggccaaaaagcgccagccggtgaagcccgtggtggcgaaagaacctgctcgcaccgccaaaaattttggctatgaagagatgttgagcgagctggaagctatcgtcgcggatgctgaaacgcgtttagccgaggatgaagctaccgcgtaaagacaggttgccggatgcggcgaaaacgccttatccggcctacaaaatccaacaacattaacgaattaaacaacccgtaggccggacaagatgcgccagcatcgcatccggcacgatccccaaaacctggcgtttatctggccttgctcgccataatctcgataatctgccgatccgtttgctgcatcgaatggcttgctaacgcacacaggttggcaatcgactgctcaacatcatgcgccacaatcccttcattgccggtcacggcggtatcatccagcgccattaacaccgctttccacgcagccgaagcactggtcgaaaccttcatcgcgcagctgttcgacgcaccatcgcaaatcatgccgctgacatcgccgatcatactgctgatcgccatcgagatggtttcataacgcccatccaccagccatgccatcccggcggcggcccccattgctgcggtcgttgcggcacacagcgcagacaaacgcggtaactggttatggatgtaaattgcgctcaaatgcgaaagcatcagcgcacgcgccagccgttcatcatccgctccgaagtgttctgctaccaccaccacaggcattgttgcggtaatcccctggttacccgagccggagttactcatagccggaagcgtagcgccgcccatacgcgcatcggatgccgcgctggtacgaatcacaatggatgaagagagatctttcgccagcaaaccgcgctcgcactgtttttccagcgtcgcgccaatatgcagcccccacttaccgctcaaaccttcctgcgataacgcacaatttagcttcgcggaatcgagaataaagcggatcgccgcaaacgggacttcattgacgaacttcaggatctcagccagcgtcgttctggaaagcaccgtcagcggagactcttgctcgccctctgccacacacgcctgctgggtaaacaccacaccatcgtgcgtctcgatatgcacaatgttggtatgcccgccgacgatggtgacacacgcccacttctcaccgttccagactttggcgcgtgagaagaggatttcatcgcaaggttcctggatcttaacggagactttccccgccgccagcagtgctttggcatcggcaattgcctgcgctgttgcgtctttcagcacttccagcccggcgttggcatttccacctaacgcccccagcgccgccgcaatcggcagccccaccattcccgtgccgggaacggtgacgcccagaccgttcttcatcagatttggcgaaacccaggcttctacacgttcaaccggaccttccagttctgccgcagcaaccgccgccgccagcgccagtgaaatcggttcagtacatcccagcgccggttttacttcctcctgaacggcgaggatgtaacgctgccataacggatttaaagtcgaatcaaacatattaaaaaccttaaaatttcaggtaaatcaagaaaatgccaggaacggagaaacacacagcaacaaaccagtgacgataatcaggaacagagacatccctttgtatttgtgcaatgctggtactttgtaaaccagccacaccgggatcaggcaccctaccatgccgaaaatcgggctacagatagaggtgaagctcaacaccggtgcgttcagtacgatggcgctccaggccagcaaaatggcgaaaatcatgatgccgcgctgaacgagattttcgttaatcttctcggcaggcatcttgcgacgcaggatgttcattacgatcccttgcgttgcttcgcgaaagcctaaatagacgccaaagaatgcagtcatgacagcaaagatattgagaatgacgctgaccactttcacccacgctgcgccgtcaccgctaataaactgtgcggcaatcgccagcgcggaaatattctgctcataggcttttaccgcttcgtcatgtcccatcgccagcgtgaacgacacggcgtagaaaaagacggtgacaaacaaaatgccaaacgcgatattcattgcccgcaatgctttatgccgcgccacttcaattgatttttcccgcgagcgataagagatcaccatcggacttaacgtctggataaacagaatcgacgtcagggtaaacggcagcgtaataatggcgtttttcaccagcagccccagcggcggtagcgaaccgacgttatacagatgccacattcccaccatcgacacgcccagcgccgcgaccaccagcagcttggtcagcaccatgccggtcgaaattttgaataacaatttctcgccgcgtgaggagatcgccaccagaatgcaaatcagtaccagaccataaaagggactgtctgacagcaacccttccgtcacgccgaaggtatgcaggtaggaagcactatcgttggtgatggcggtggaatagacgaacatccaaatcaccagcattacgaaatagagcgcacctaacaggatgccccagtttttacctaaataaccgctaatgacgctcgggtaatctttacattctggtgattctgccagcgtattaataaacaatcgctgaaacagatacattgccgggtaaccaatcaccgatgagagcaaaaatacccacaatcccatcaaaccgacctgcaccgggagaaaaacaatccccgcgccaatcgccatcccgatactcataatcacccagccggtgtcagtactgtcgaatttgatcgcttctcgccactcgctctcactcattccagcacgacccgccggggtcgaagcgtctgcaatgacgcctttattcgatgcaatttccataatttctcgctcaatattttgtagggcttattatttttttccgagccgcatcaaggcgatatgcggtctacgtttttgcaggcgagttattagaataaagaaatgatacgcgcgaggtcagagaaaatcttcacaatcaagactttgaaataacggagatggataagaattttctactaaattaatcgcaggagaatattcattctctatttgcggcagatcacaaaaaaaaggtgcacatttgtgcacccaaggatgaaagctgacagcaatgtcagccgcagaccactttaatggccagtcctccgcgtgatgtttcgcggtatttatcgttcatatctttgccggtttcatacatcgtctcgatcactttatcgagtgaaacacgcggtgccgaggtgcggcgcatcgccatccgcgcggcgtttactgctttcacggcattaatggcattacgttcaatgcacgggatttgtacctgtccggcaaccggatcgcaggtcagcccaaggttatgctccatcgcgatttccgccgcattgcatacctgcgccggactgccgcccagtagttcagttaaccctgccgccgccattgaacaggccacgccaatctccccctgacagccgacttccgcgccagagatggaggcgttcattttatacagcgcgccaatagcccccgcggccagaaaatagcgggcaattgaccgctcgtttaccggacgacggaacttatcgtaataagccagtactgccggaataatgccgcacgcaccgttagtcggtgccgttaccacgcgcccgccagctgcgttttcttcactaaccgccagcgcgtacatgttgatccagtcgatgacattcatcggatcgttagagatgttatcgctggaaaccagctgacgacgcagcgctacggcacggcgcggcacattgagcggaccaggcagcacgccttcagtgttcatcccacgttcaataccgtcatgcatcacttgccagatacgggcaaaaccggcgtcaatttccgctttgctgcgcagcgctagctcgttgtgcatcatcagaccagatatagacaggccgttgtaatcacacattttcagcagttcacctgctgagtggaaatcgtaaggtacggacgtttcgacatcgtgcgacaggccgaagtgttcttcttcgacaataaacccgccgccgacagagtaataggttttacttaatagctcttcctgtcccttccaggcagtgatccgcattccgttctcatggcgaggcaacatttcgggatggaagataatgttctttgctacaggaaaatcaacaatatgcgcaccagatgccactggcagccgcccgctgcgcgttactaactctataaatgcagggatctcatcaatgacaacatcctgcggactgtttcctgccagtcccatgatgatagcgacatccgtggcatggcctttgcccgtcagtgacaacgacccgtacagatcgaccacaatatggctcgtcgcggttaataagccgctactttccagccgatcaataaaactttttccggcattcattggccccacggtatgcgaactggagggaccaatcccaattttgaaaatatcgaatgcactaatcatatccacaccctcggattgccgttcagtgaagtggagcggaacgaccttacgaccgtcccgctcacgaggctttacgcactacgtactgcgatggcttcaatttccagcttcacatctttcggcaaacgcgcgacctgcacacagctccgggtcggataggtcgcctgatgctcatcgaagaactgcttatagacttcgttgatggtggcaaaatcattcagatcggtgataaacacggtcatcttgatgatatcgcccacgctcagcccggcagcaaccacgatcgctttgacgttttcgaggcttaaacgcgcctgatcttgcacatcagccgggatctcaccggtctgtgggcaaaccggtatttgcccggaggtgaagaccatgctgcctaaatcaacgccctgaacataagggccgattgcgcctggggcacgttgcgtttcgataatctttttcatacatcctccggcgtcagagcgcctgggtaaaggtacgtgaaataacatcctgttgctgttcacgggtcagtgcgttgaagcgcacggcgtagccagagacacggattgtcaggttaggatatttttccgggtgctcgatggcatccagcagcatttcccgattcattacgttgacgttgaggtgttgaccgccttcgacatccgcttcgtggtggaaatacccatccagcaggccgacaaggttggttttacgtactggatcttctttgcccagcgccgcaggaacgattgagaaggtgtacgagatcccatctttggcgtaggtgaacggcagtttcgccaccgacgtcaatgaggccacggcacctttgcggtcacgaccatgcatcgggttagcgcccggcgcgaacggtgttccggcgcgacgaccgtccggcgtattaccggttttctggccgtacaccacgttagaagtgatagtcagaatcgactgggtagggacggcgttgcgataggttggcagcgctttaattttcttcataaagcgttcaaccaggtcgcaggcaatgctgtctacgcgctcgtcgttgttgccgtactgcggatattcaccgtcgatttcaaagtccaccgccaggccgttttcgtcacggattggtttcacgcgggcatatttgatggcagacagggagtccgtcgccaccgacaggcccgcgatgccgcatgccatagtgcgatagacatcacgatcgtgcagcgccatcagcgaagcttcgtagctgtacttgtcgtgcatgtagtgaatgatattcagcgcgctgatgtactgcaccgccagccagtccatgaagtgatcgaggctgtccatcactttgtcgtaatccagcacgtcgtccatcagcggtgctgttttcggcccgacctgaatcttcagcttctcgtccaccccgccgttaattgcgtagagcagcgttttcgccaggttagcgcgtgcaccaaagaactgcatttgcttaccaatcaccattgggctgacgcagcaggcaatcgcgtaatcgtcgctgttgaagtcagtacgcatcagatcgtcattttcatactgcaaggaagaggtgacgatcgacacctgcgcggcatattttttgaaggcaatcggtaattcttccgaccaaagaatggtcaggttaggttccggtgccggccccatagtgtgcagggtgtgcaaatagcggaaggagtttttggtcaccagcgtacgaccgtccagccccatcccgccgatcacttccgtcgcccagattgggtcgccggagaacagcgaatcaaattccggtgtacgcaggaagcgtaccatacggatcttcatgatgaagtgatcgatcagttcctgtgcctgctgctcattgagtacgccagctttaaagtcgcgctcaatgtagatatcgaggaacgatgccgtgcggcccagcgacatcgcgccgccattttgcgatttcactgccgccagataagcgaagtagagccactgcaccgcttcctgcgcattctgcgccgggcgagagatatcaaagccatatttcgccgccatttcctgaatctgcaacagcgcatgacgatgctctgccagctcctcacgcagacggatggtggcttccagatcctcgcctttttccagacgagactggagatcggcaaattgcagttcgcgttcacgtaccagataactgatgccatacagcgctacgcggcgatagtcaccgataatgcgcccacggccatagccatctggtaaaccggtcagcacgccagatttacggcagcgcagcatatccggtgagtaaacatcaaatacgccctggttatgggttttacgcagatcggtaaacagatattcaaattcactgtccatttctcggccataggcgtggaatgaacttttaatcatattaatgccaccgaacgggtgtagcgcacgtttcaacggcgcatccgtttgcaggccaacaattttttccagcggctggttaatatatcccgcatcatgagcggtaattgtggtggcaatattggtatcgaaatcaaccggcgcgtgggttgcattttcgatacggatgccttccattactttttcccacaattccgtggtggcaggcgtcgcttcggcgaggaaagattcatcgccttcatacggtgtatagttatgttgaataaaatcgcggacattaatttcgtttttccagtccgtacctttaaagccaagccatgcgtcggcgtacagcttatcgctggtatcaatatctaccttcatgaaaaataatctctctacaatacttcaactaaattatgcaaattctgcgggcgcgttaactttgcctaactgaatggcatccaaagcaatcattttttcttcgttagtcggaataacggcacaaatgacacgcgcattttcactggaaacaattcgctcaccacaggagttagagcgattattcatttctgtatcaatctctaagcctaatacagccaaatgttccatgaccagacgacgaattaagcttgaattctctcctattccgccggtgaatataattccatccaggcgacgtaatgaagctgcgtgtccggcaatatgacgggcaattcggtgaacaaaggttttaattgccagttgcgcgcgttcgtgaccttcatgccaggctttttccagaacacgtaaatccgaagaaagaccggaaatacctaataatcccgactctttattcactacgcgttccaggtcacccaggctctggttggtttggctggcgacccaggacatcgcaccaaagtcgacatcgccactgcgggtacccatcatcaagccttccagcggcgtcattcccattgaggtatcaacactctgaccgttgcgaaccgcgcagattgacgcgccattgccaagatgcgccacaaccaggccggagtcatcttccgccagattcagcagcgaatgtgcgcgctgggaaacatagcggtgcgacgtgccgtggaaaccataacggcgtacacctaactcttcataatatttccacggcaggccgtataaataagcttccggagccatcgtctggtggaaactggtatcaaataccgccacctgagttacgcccggaaataattgctgcgccgattcaataccacttaaattggcgtaattatgcaggggtgccagtggagaaacgcgacggatattatcaatgacttcatcggtaataatggcggactcggtaaaaatactgccgccgtgagcgatgcggtggccaattaaggccacactgtcatttaaattccgtttttccagttcaaatgcaattgccttcaatgcaccttcgtagctgtggtgagccagcggtgctggctctcccccatttacggataagaatgcattttccgagttaataccgtcggcaatacctgacattaatacttcacagtcgctggcatcgagcacggaaaacttaatcgaagacgaaccacagttaataaccaaaacaaccggaaattcattcatctcttttctcatcctgagttacggattaaaacagtttgtatacgatgttcaggatggtcagcagaccaatcacggtaacaaacacgttatccagacgaccacggtatttcgccagagacggcgctttacggatggcatacatcggcaacaggcacagcagggatgcgataatcggtgcgcccatggcttcaatcaggtcaaggatgttcgggttggcgtaggcaacaacccaggtggagcccatgatgaagatcatgctgatagtgttcagtttacccagcgacactttagttttgtcgcctttataaccaaacttcaggaccaggccattcagaccttccagcgttcccagatagtgaccgaagaaagatttgaagatagccacgagtgcgatgatggaagccgcatattccagtgtaatcgcgaacgttgttttggtaccggtcatggacgcaaagtggttagccagataagaaagcactggaatattctgcgctttggcttccgccatgttggccggagacagagtaaacaggcagctaaaggcaaagaacatcaccactgcaaccatcagcatgctggcacgagaaatgatttgggaacatttacgttcggtgaagtcgcgaccgaagtctttctcatactcttcacgcttagaaaccacgaaggaagagacgattggcgagaagttaaaggagaaaaccatgatggaaatccccagccagacagtgatcaggataccgtcatgaccggttaacgacagcgaaccgaggtcaacctggtcgataactgcagagttccagtaagggatcagcgacaaagaaatcagcaccaggctggcgataaacggccataccaggtagctcatcactttaaccatcagatccttaccaaaccagatgacgaaagccatcagcagcaacaggaacagcgccacaaagccgcgattcagcggtgcaaagccgagctggttttcccagaacgtcataaaggtattggtaatagtaacgccataaatccacagcagtgggcaaatcgcgaagaagtacaggaacgtgataaccacgccgccagttttaccaaaatgctcttccaccgtttccgtaatgttgccggaagggttagagccagaaagacacagacgcgccagcgcccggtggcaataaaacgcgatggggtatgccaataccaacatcagaagaatcgggatcagtccgccaaaacctgcgcggatagggaagaacagcaccccggcgccgattgccgtaccaaacaagcctaacgtccatgtggtatctgatttacgccaggacgattgttttgtctggctggatacaatgctatctgaagtactcatatcctatcctcaacgaattaattaagcgtcaacgaaaccggtgatttgagagacgcgagaaagatcgatattgccgccggaaataatactgacggtttttctgttttgaatatattggtctaatttaccgcttaataatgcagcacatgccagagcgcctgcgccttcggtgacgactttattgcgctgaattaaggcaatcatactgtttctgatttcgtcttcgctgaccagcacgatgtcatcgactaattcacgaacgatttcgtaagttaaattacccgggcgggagacatcacaaccatccgccagggtgccggtagttcggtgcgtggttatttctccggagtggaaagaagccgccatgccgtgaacgttttcagactgtacgccaataacacgaatggtcgggttaatagatttaattgccaccgcaataccagcaattaaaccgccaccaccaattggcacaatcacgttatcgacatcatagagatcttccataatttccagaccaatcgttccctggccagcaatcactttcggatcatcgtaaggtgggataaaaatacggccttccatttcgacaatttcgctcactttagcgatagtgtcgttgaagttatcaccatgcagaacgacttctgcggagtagtcgcacgttgccgctactttggattttggcgcaccttttggcatcaccactttaccgtcgatacccagcatcgcgcaggagagggaaaccccttgcgcatggttgcccgcagaacaggccaccacgcctttgcgtttttccgcatcggtcagtgaacttaatttattaaatgcgccacgaattttaaatgaacccgtacgctgcatattttcaaacttcaggaatatttcacctttgcaacgttcactaaaatagttggagcgaggcatgcctgttttataaattcgcccagccagtcgttgtttcgcttcaataatgtcatcaatagcaaccggcagatcgtatgtaatatgcattataaaacctcttcgcctgaattaaatatgtaggtaaccgtaaccgacacctgcaagacagacaggtggattatttatgtttaaataaaaacaaataactaaccaacttctattaattgccttcgtctacacccattataagatgaatactctttggctaattccaccaaaaccgatgctgcttttttaatacgataatttttcgaccataccgcggcatattgtgccacaggtaatgtttcttcaaccggaatagtaataaattgattagaaccaaaaggtgacgtcatatcacaaggaattacagttaagaaatcagcattgagaacaagattataaattgtcacgactgagtcggttttaacgatgttttcaatactgatgccatttctttgtaacgtagtaagcagttcgctgtagtaccccatattagtttgtggcaacacccactgttcgttcttcaacgactccagcgtggtggtgccggtgcatgttcgggacttactggctaccagcacaaactcggactcgaacagcggctcaacatgtaaatcctgaagcttcatttctgcacttaacgtaccaatcgcaaaatccagtcgaccgtcgcggattgccggtaagaacgaagacagttgcgcttcatacatagaaacctgcgctttcgggaacacctctttgaacttgttgatcatccctgacataaaagtaaaaccaatcaatgaaggaaaaccaaatgagacttccaccaccgcctcagaagacataccgcttatctcattaaccatatttttcatttcacgggtaatggattcggaacgggagagtaacaattgaccggcaggtgttaatgttacaccggtatttttccgcaccactaattccacaccaaaataatcttcaatatcgttaatgattttactgacggccggttgagttaaccctaattcttttgcagccgagccgatagaaccacttctaatgacttcctgaaagactaccaggtgctgcgttttcggaagaagaatagtgctcataacgacctacgttaattacctcattgacggcatgaagtgtatcaaaatgaaatgaacaggatatgtgcgaccactcacaaattaactttcaatactttccagagtatcgttattacaattaaatacctttaaatatcaacaagttaaagtataaaaatcagcataaaccctgatttttgtcaaaaaaaatgacggggataaccatattttatggcgataacatcattcgttatgtggttaatacaaaaaaggggctgagaccatatttcaagcaattaccggataattaccaggcaaaatttgagttaaatttaatgagcaagttctcaaattttattataaataaaccattttcagtgataaataatgcggcatgtcacattttttcacgctatttgttggagaacaaacatttattttatcaatattttaaaatttcgaatacatgtattgatcatctcgaacaattgattaacgtcaactttttctcttctgacaggacgtcattttgtgaatgcaatcgttttccataaattcttctcccctcataggcgacgaatagcattttgtgttgaggatcacaaaacgaataattgctgatcgccgcgataaggtcagacaaagacaacaagggaaattttcacagagcttttgatcggcgtaggccacagaatgttgcttcgtttactgtaacgccgggtaaatgagcgttttttgatagtgcgaaagaaccctgcgaggaaaataagcatctattattgtttgtcatgatgacaaggcaggcatcaatgaaaggcttcccaattgcgcatatttttcacccttcaatcccgccaatgcacgcagtggttaacaatcacaatagaaatattgattattggacggtaaaaagaaagtttgcagaaattgtctccaccaatgacgttaataaaatttacagtataagtaatgaactgcggagagtattatctgcaataactgcattgaatttctatcatggcgatgttccttctgtcatgatccgaatccaaccggaaaatatgagtccattcattatagatatttctacaggagaacatgatgattatatcatacaaacattagatgtaggcacttttgcaccttttggtgaacaatgtacttgctcagccgtcaataaaaaagagctggaatgtattaaggagacgatttctaagtattgtgcaaaattcacccgaaaagaagccatcttaaccccccttgtgcactttaataaaaccagcattacttcagattgttggcaaattctctttttttcacccgatcattttaataatgatttttattgattatttataaaggataaaataatgttccctgtttcatcaattggtaatgatattagtagtgatttagtccgtcgaaaaatgaatgaccttcctgaaagcccaacaggaaataacctcgaagcactagcaccaggtatagaaaaactaaaacagacctctattgaaatggtcactttacttaacacgttacaacctggtggaaaatgcattatcactggtgattttcaaaaagaattagcgtacttacaaaatgtaattctttataatgtctcgtctcttcgtctggattttttaggttataacgcccaaattattcaacgatcggacaatacttgtgaacttaccattaatgaaccgttaaaaaaccaggaaatatccacaggtaatatcaatattaattgcccattaaaagatatttacaatgaaatcaggaggttaaacgtaatttttagttgtgggactggagatatcgttgatctatcctctctggacttacgtaatgtcgatttagattattatgatttcacagataaacatatggctaatactattttaaatccttttaaattgaattcaacaaattttactaatgccaacatgtttcaggttaattttgttagttcaacacaaaacgccacaatctcctgggattatttactaaaaataacgcctgttttaataagcattagcgatatgtattctgaagaaaaaatcaagtttgtcgaaagttgtttaaatgagcctggagacattaccgaagaacaattaaaaattatgagatttgcaattataaaatctataccaagggcaactcttacagataaattagaaaatgaattaacaaaagaaatatataaaagctcatcgaaaatcatcaattgcttgaacagaattaaattaccagagatgaaagaattctcatcagaaaaaatatatgattacatcgatataatcattgaagattatgaaaatatcaaagaaaatgcttatctggtcgtcccccaaattaattatactatggatttaaacatagaagactctagctcagaagagttactttcagataataccctcgagaaagacgaaaattctccggacaatgactttgaggtcggggaatataacacatatgaagcatataactcagagaagcaatattttaccagagaggactatacgtatgattacgaccttttaaatgcaatatagacttaataacttcttacaaagtctattattaataccgtagatatttattcatcttaccctgtgcaccaaaagcaaaaactcactgacgcgggtttgaaactgatggcaaccgcaaaaatgcctgatgcgctacgcttatcaggcctacgccatctctgcaatatattgaatttgcgtgcttttgtaggcaggataaggcgttcacgccgcatccggcatgaataaagcgcactcaacaatctgaaacccgccggaacggtttattacgtacatcaggtaaaactgaccgataagccgctttcttttgggtatagtgtcgtggacagtcattcatctttctgcccctccaaaagtaaaaacccgccgaagcgggtttttacgtaaaccaggtgaaactgaccgataagccgctttcttttgggtatagcgtcgtggacagtcattcatctttctgcccctccaaaagcaaaaacccgccgaagcgggtttttacgtaaatcaggtgaaactgaccgataagccgggttctgtcgtggacagtcattcatctaggccagcaatcgctcactggctcaagcagcctacccgggttcagtacgggccgtaccttatgaacccctatttggccttgctccgggtggagtttaccgtgccacggactgttaccagccgcgcggtgcgctcttaccgcaccctttcacccttacctgatcccgcttgcgcgggccatcggcggtttgctctctgttgcactggtcgtgggtttcccccccaggcgttacctggcaccctgccctatggagcccggactttcctcccctccgcccgtctcccccgaagaggacgacgacgaagcggcgactgtctggtcagcttcggcgcgcagtatagagggtttgcgcgcccttgtcaccccgcgttgcgcattccaatcgccagtgtcgcggcgatattacgtgaagcacggcagatattgtcataagccccgcggaatgcttcgtccaacgtacctatgctggtcaatacgctgaagaccgcatcaatgccatgctgatgtacaacgccaacatcatcggtcaggctacccgcaatgccaatcaccggtttatggtacttcttcgccacgtttgcgacaccaatcggtaccttcccgtgaatactctggctgtcaatacgcccttcaccggtgatcaccagcgtacaatcgtgaatatgttcctccagattcagcgccgtagtgacgatttcaataccacttttcagttccgcaccaagaaacgccattagcgccgcgcccataccacccgcagctcctgcaccggggacatctttcacatcaacatgcagcgcttttttaatgacctcggcatagtgagagaggttattgtccagctcaacaatcatcgcttcactggctcccttttgtgggccaaagatgcgcgatgcgccgttatcgcccaccagcggattggtgacatcacaagcgacgcgaatgacgcaatcttttaagcgcggatcgaggccggaaatatcaatatcattcagagtattaagactaccgccgccaaaaccaatttcattgccgttggcgtcgcataatttcgcccccagcgcctgtaccatgcctgcgccgccatcatttgtagcgctgccgccaatgccgataataatgtttgtcgcaccgctctccagcgcctgcaggattaactcgcctgtgccgcgtgaagtggtcacgagtggatcgcgtttttccgcaggtaccagctccagcccactggccgccgccatttcaataaacgcggttttgccatcgccggagatcccccaactggcattcactttctcgcccagcggccctgtaacccaggcgtgacgttcagccccctgggtggctgcaatcatcgcttccaccgttccttcgccaccgtcggcaaccggaacagaaacgtactgtgcatcaggaaaaatttcccgaaatcctttttctatcgcctgcgcaacctcgctggcagataaactttctttataagagtctggggcgattacgattttcatacctatgcctgttaccacatgacgccggagggcgtttctcttattcggcctggattccaggcccggattgcaatacgccatccgggcacgacgtcattaacgagtaacttcgactttcgccagtttttcgtagtagcacgccagggcgctatgatccgccgttcctaaaccatctgctcgcagtgcctgcatcatctccataaccgcagctgtgagcggcagttgtgcgccgacgccgtgagaagtatccagcgcattcgccagatccttaatatgcagatcaatacggaagcccggcttgaagttgcggtccatcaccatcggcgctttggcatccagcacggtactgcccgccagtccaccgcgaattgcctgataaaccaggtccgggttaacgcccgctttagttgccagcgttaacgcttctgacatcgcggcaatattcagcgccacaatgacctgatttgccagtttggtgacgttacctgcaccgatttccccggtatgcaccacggaacccgccatcgctttcatcaaatcatagtatttgtcgaaaatagccttgtcgccgcccaccatcactgacagcgtaccgtcgatggctttcggttcaccgccgctcaccggagcatccagcatatcaatgcctttcgctttcagcgcttcgctgatttcacggcttgccagcggtgcgatagaactcatatcgatcaataccgtacctggcttcgcgccttcaataatgccattctcacccagcgccacctctttcacatgaggggagtttggcagcatggttatgatgacgtcgcactgttcagcgatcgctttagccgtagacgctgtttctgcacctgcagcaatcacgtcagcaatagcttctgggttacggtcagcaaccaccagcgagtaacctgctttcagaaggtttttactcattggtttacccataatccccaggccaataaaaccaactttcatagtcatatcaatcatctctcttgttgcggtggtggttattttttaaaggtatcagccagtttctgagtggcagagcggaagacgccgagatcgctgccgacagccacaaacgtcgcgccccattccagataacgacgcgcatcggcttcgaccggcgcgaggataccgctgggtttgccgtgcgcgctggcacggttaaaaatgtgctgaattgctttttgtacatccgggtgtgatgcattgccgagatggcctaatgccgcggccagatcgctggggccgacgaagatgccgtctacgccttcggtagcggcaatggcatcgacgttatctacgccctgctgactttctatctggaccagaatagtgatgttcttgttcgactgagcgaaataatccgccacggtgccaaacatattggcgcggtgagaaacggagacgccgcgaatgccttccggtgggtaacgggttgatgccaccgccagctctgcttcctcttttgtttctacaaaaggaatcaggaagttatagaaaccgatatccagaagacgcttaataattaccggctcgttggtcggcactcgcactactggcgcgctggcgctgcctttcaaggccattaactgcggaataaacgtggagatatcgtttggcgcatgttcgccatccagcaccagccagtcaaacccagccaaaccaagaacttcagtgctaatcgggttagagagtgctgaccagcaaccaatttgtacctgtttcgcagccagtgcggctttgaatttattcgggaaaacatcgttattcatcgcttatacctttgcttatttctgcaattccatacgtttaatgtcgccaactacgaagaggtagcagaccatcgccatcagcgctgaacatcccacgaaaaccagtgctgcattgaaggagtgcagttcacttaccaggtagccaatcaccagtggagtgacaatggaggcaacattgccaaagacgttaaagacgccgccgcagaggccaacaatctctttcggcgcggtgtcagaaatcaccggccagcccagcgcaccaaatcctttgccaaagaaagccagcgccatcagcatgaccaccagcgtggtgttgttggtgtagttacataagatgatggtggaagccagcaacattcccagcacaatcggtagcttacgtgccagggtcagggataaaccgcgtttgatcagataatccgagaagacacctcccagcacgccgcccgcaaaaccacacagtgctggaatcgaggcgaccagacccactttcagaatcgacatgcctttttcctgcaccagataaatcgggaaccaggtgaggaagaaccaggtgatggtgttgataaaatattgtccgaaaaatacgcccagcatcatgcggttagagagcaattgcttgatgtaatgcagtttgggtccgcttgctgccgcactgcccggctttttgtggtccatatcgaccaccgcgccattttcagagataaacttcagctcttccgcagacatacgtgggtgatctgtcgggttatgaatcaacttgatccacagcgccgtcagcacaaaaccaatcacccccataacggtaaagacgtgctcccagccccaggcgaaagtcagccagccaagcagcggcgaaaagagcgccagcgagaaatattgcgccgagttaaagatggcggaggcagtaccacgttctttcgtcgggaaccaggcggcgacaattcgggcgttcgccgggaatgatggcgcttccgagaagccgagcataaagcgcataaagaacatggagatccctgcccaggccagcgggaacatatcaacaaagccttgcaggaaggtgaatagcgaccagaaaaagaggctgtaggtgtaaacttttttcgagccaaacttatcaagcagccagccgccggggatttgcatcagcaagtaggcccagccaaaagcggagaagatgtaacccatcgaaaccgcacttaactgcaactcttttgccacttcggtaccagcaatagacagcgttgcacgatcggcgtagttaacggcggtaacaataaaaataatcagtaatattaaatagcgggtatgcacgcctttctttttttcgtcaacggtgtccagaatcattttatttacctcgggtacttatgctgatttttattattatggggaaggtgttatttatgagtttcatttatgccgtaacgacaatgaactcgggaattagtataagcagcgcgagaataataatcattgtgcaaatgctaatttaattaatactatttaaatattattttgagcatatgcacataaggttgcgcgctaaagcacagatttgcgctttaccttaccgggcggcactgcaatccctgaaatgattgacattgatcacatttctgcgtttaaactcctgacattcttatttcacccaatgaagtcatttatttttaaatgagaccaggtcctcattttaataacccctggctggagaatattgcacaatggccaacatcgaaatcagacaagaaacgccaactgcgttttatataaaagttcacgacacagataatgtggcaattattgttaatgataatggcctgaaagcaggaacgcgttttccggatgggctggaattaattgaacatattccccaggggcataaagtcgcattgctggacattccggctaatggtgaaattattcgttatggcgaagtgattggttacgccgtgcgtgcaatcccacgcggaagctggatcgacgaatcaatggttgtactaccggaagcgccgccgttacacacgctgccactggcaaccaaagtcccggaacccttaccgccgctggaaggatacacctttgagggctatcgcaatgccgatggcagcgtgggcaccaaaaacctgctcggtatcaccaccagcgtccactgtgtggcaggcgtggtggactatgtagtaaaaatcattgaacgcgatctgctaccgaaatacccgaacgtcgatggcgtggtggggctgaatcatttgtacggttgtggcgtggcgattaacgcaccggcggcagttgtacctatccgtaccattcacaatatttcgctgaatcctaactttggcggcgaagtaatggtgattggcctgggttgtgaaaagttgcagcctgagcgcctgctgactggaacggatgatgtgcaagctattccagtagaaagcgccagcattgtcagtttgcaggatgaaaagcatgtcggttttcagtccatggtcgaggatattttgcagatcgccgaacgccatctacaaaaactgaatcaacggcagcgagaaacctgcccggcttcagaactggtcgttggtatgcagtgcggtggcagcgatgcgttttctggtgtaacggcaaacccggcggttggctatgcgtctgatctactggtgcgctgcggcgcaacggtgatgttttcagaagtaacggaagtgcgtgacgcgatccatctgctgacaccacgcgcagtgaacgaagaggtcggcaaacggctgctggaggagatggagtggtacgataactatctcaatatgggaaaaaccgaccgcagcgccaacccttcgccgggcaacaagaaaggcggtctggcaaacgtggtagagaaggcactcggctccattgctaaatcgggtaaaagcgcaattgttgaagtgctgtcgcccggtcaacgcccgactaaacgcggattaatttacgccgcgacgccagccagcgattttgtctgtggcacgcaacaggtggcttcgggtatcacagtgcaagtgtttacgaccggtcgtggtacgccgtacggcctgatggcggtacccgtcattaaaatggcaacccgcaccgagctggcgaaccgctggtttgatttaatggatattaatgcgggcaccatcgctaccggcgaagaaactattgaagaggtgggctggaagttgttccactttattctcgacgtcgccagcgggaagaagaaaaccttctcggatcaatgggggctgcataaccagctggcggtgtttaacccggcaccggtgacctgatttcttttggaacgtccctcgcaaaacatggccttagtgccatgtttttattgtttaaagcccccacgtccattaataatgcatttgcattaccttagttcaagcttataatttgagcagaaaacaggctgtaaaaggacagtgaatcatgcccgctaatgctcgctctcacgctgtactgaccactgaatcaaaggtcacgatacgcggacaaacaactatccccgcgccagtgcgtgaggccttaaaactgaagccaggccaggacagcattcattacgaaattctgcctggtgggcaagtatttatgtgccgactgggagatgaacaggaggatcatactatgaatgcatttttgcgttttctggatgcagatatccagaacaacccgcaaaaaactcgtccattcaacattcaacaaggaaagaaacttgtcgctggcatggacgtcaacattgatgatgagattggcgacgacgaataatggattttccacaaagggttaatggttgggcgctatatgctcatccctgttttcaggaaacctacgacgctttagttgccgaagtcgagacattaaagggaaaagatcctgaaaattatcagagaaaagccgccacaaagttattggcggtagtccataaagtgattgaggagcatatcacggtcaatccatcatcaccggcattccgtcatggcaagtcgttaggctctgggaaaaataaagactggtcacgggtaaaatttggtgctggtcgttatcgtctcttctttcgttatagtgaaaaagagaaagtcatcattctgggatggatgaacgatgaaaacactctgcgcacctacggtaaaaaaacagatgcctataccgtattcagcaaaatgttaaaaagaggacatcctcctgccgactgggaaaccctcacccgagaaacagaagaaacccattgatggtgttcacaatgcccgccgaacgcattcgtgttgaccagcgggcatcctttctcactccccgaccagaatcacttcaaccccagcctttcgcagtccttccaggctatccgcaggaatgccttcatcaacaatgatcatgtcgatacgttgagtatcaatgatcttatgtaaactggaacgattgaacttactggaatcggtgaccacgatgatccgttccgcaacttcgcacatccgacggtttaaacgagcttcatcttcattatgtgtgctgacgccgcgctccagatcgatcgcatctacaccaagaaacagcatatcgaagtggtaattttgcagcgattgctcagcctgatcgccgtaaaaagattgcgactgacggcgcaaatgcccgccggtcatcagcagctcaacgccttccgcttccagcaacgcattagccacgttcataccgttggtcatcgcaattacgtcagtgtgcttgcgcatcagacgagcaatctcaaaagtggtggtcccggaatcgaggataacccgatgacctggctgaatcaactcaacggcagctttcgcaacgctgcgtttcatcgcggtgttcagtgcgcttttatcttccactgatggctcgactgacggcgtcgtgctatcgcagatcaacgcgccaccataggcacgcacagcgatcccctgcttttccagaaacgccagatcgttgcggatcgtcacagtagatacgccatacaatgccgacagatcgttaacctgcacactcccttgctgtcgcagacgctgaatgatctgttctcgtcgctcgctggtgccagtcactcgcttctcacctgaagcgtcggtattactcatagtaagtcctttcgtaaaactttcgtttcatttcgttttgcctattaacgcctttctattaagcaaatgcaagcccaccttgcccattgacgcaagctactctcgtttcagtgactttcattatgtttcttttgtgaatcagatcagaaaactattatctttcgttttatttttatctcaccatgacgcagtatcaactgaaacaaaacgaaagattaatatcgcagtaatctgaactggagaggaaagtgaaacatctgacagaaatggtgagacagcacaaagcgggcaaaacaaatggaatttatgccgtttgttccgcacatccgctggtgctggaggctgcaatccgctacgccagtgcaaaccaaacgccgttactgattgaagcaacctccaatcaggtagaccagttcggcggttataccggaatgacgcccgccgattttcgcggctttgtttgtcagctcgccgactcgttgaatttcccgcaggatgcgttgattctgggtggtgaccatctggggccaaaccgctggcaaaacctgccggccgctcaggcaatggccaatgccgatgatttgattaaaagctacgttgcggcaggattcaaaaaaatccaccttgattgcagcatgtcctgtcaggacgatccgattcccttaactgatgacatcgtggctgaacgcgccgcccgtctggcgaaagtggcggaagaaacctgtcttgaacactttggcgaagccgatctggagtatgtcattggtaccgaagtgccggtacctggcggcgcgcatgaaaccttaagcgagctggcggtcaccacgccggatgccgcccgcgccacgctggaagcccatcgtcacgcctttgaaaagcaaggtttgaatgccatctggccacgcatcattgccctggtggttcaacccggcgtcgaattcgatcacaccaacgttattgattatcagcccgccaaagcgagcgccttaagccagatggtcgaaaactacgaaacgctgattttcgaagcgcactctaccgattatcaaacgccgcaatcgctgcgccagctggtgattgaccactttgccattctgaaagttggcccagcgctgaccttcgccctgcgtgaagctctgttctctctggcggcgattgaagaagaactggtgccagcgaaagcctgttctggtctgcgtcaggtgctggaagacgtgatgctcgaccgcccggaatactggcaaagccactaccacggtgacggcaacgcgcgtcgtctggcgcgtggttatagctactcggatcgcgtgcgctattactggccggacagccagattgatgacgctttcgctcatctggtacgtaatctggcggattcaccaattccgctgccgctgatcagccagtatctgccgctgcagtacgtgaaagttcgctccggcgagctgcagccaacgccacgggaactcattatcaaccatattcaggacatcctggcgcagtaccacacagcctgtgaaggccaataagcaaaacaaagaggaacacgctatgccaaatattgttttaagccggattgatgaacgcttgattcacggtcaggtcggcgttcaatgggtcggatttgcgggggcaaatctggtgctggtagccaacgatgaggttgccgaagatccggtacaacaaaacctgatggaaatggtactggcagaagggatcgccgtacgtttctggacgctgcaaaaagttatcgacaacattcatcgcgccgccgatcgacagaaaatcctgctggtttgtaaaacacccgccgatttcctgacgctggtgaaaggtggcgttccggtgaatcgcattaacgttggcaatatgcactacgccaatggcaaacaacaaatcgccaaaacggtttctgtggatgcgggcgatatcgcagcatttaacgacctgaaaaccgctggggtggaatgcttcgttcagggcgtcccgacagagcctgctgtggacctctttaaattactttgagggattcatcatggaaatcagcctgttgcaggcatttgcgttgggcattatcgcctttatcgctggcctggatatgtttaacggcctaacccatatgcaccgcccggtggtcctcggcccgttggtcgggctggtacttggcgatctgcataccggaattttaaccggcggtacgctggaactggtgtggatggggctggccccgctggcgggcgcacagccgcctaacgtgattatcggtactatcgtcggcacggcgtttgccattactactggcgtgaaacccgatgtcgcagtaggtgtcgccgtacctttcgctgtcgcagtacagatggggattaccttcctgttctcggtgatgtccggcgtgatgtctcgctgcgaccggatggcggagaacgccgatactcgcggcattgaacgcgtgaactatctggcactgctggcactcggcattttctattttctctgcgctttcctgcctatctacttcggcgcggaacatgcaaaaaccatcattgatgtcctgccgcaacgattaatcgacggcctcggcgtcgcgggcggcatcatgccagcaatcggttttgccgtgctgctgaaaatcatgatgaaaaacgtctacatcccctacttcatcctgggctttgttgccgccgcctggctcaagttaccagtgctggctattgctgccgctgcgctggcgatggcgctgatcgacttgctgcgtaaatctcctgaaccgactcaacctgcggcacagaaagaggaatttgaagatggcatctaatcaaaccaccctgccgaacgtcagtgaaaacgaagaaacattgctgactggcgtcaatgaaaacgtgtatgaagatcagagcattggcgcggagctgacgaaaaaagatatcaaccgcgtcgcctggcgttccatgctgttacaagcgtcttttaactacgaacgtatgcaggcttctggctggttgtacggtctgctgcctgctctgaaaaagatccacactaataaacgcgacctggcgcgcgccatgaaggggcatatgggtttcttcaatacccatccgtttctggtgacgtttgttatcggcattatccttgcgatggagcgttctaagcaggacgttaacagtattcagagcaccaaaattgccgtcggtgcgccgcttggcgggattggcgatgcaatgttctggctaacgctactgccgatttgtggcgggattggagccagtctggcattgcaaggctccattcttggcgcagtcgtctttattgtgctgttcaacgtggtacacctggggctgcgttttggtctggcgcattatgcttaccgcatgggcgtggcggcgattccactgattaaagcgaataccaaaaaagtcggccatgctgcgtctatcgttgggatgacggtaatcggtgcgctggtggcaacctatgttcgtttaagcaccacgctggaaatcacggcgggcgacgcagtggttaagttacaggctgatgttatcgacaaactgatgccggccttcttaccgttggtctacaccctgaccatgttttggttggtacgccgcggctggagtccgctgcgtctgattgcagttaccgtggttctcggcatcgtcggtaaattctgccatttcctttaaatacaatgaggtattagatgttaagtattattttgacagggcatggcgggtttgccagcggcatggaaaaagcaatgaagcaaattctcggtgagcaatcgcagtttatcgccatcgattttccggaaacctcaagcaccgcgctgcttacatcgcagcttgaagaggccatcgcccaactggattgtgaagacggcattgtttttctgacggatttgctgggcggcacgccgtttcgcgtagcttcaacgctggcgatgcaaaaaccgggctgtgaagtgatcaccggcaccaatttgcaactgctactggagatggtgctggagcgcgaagggttaagcggtgaagaattccgtgtacaggcgctggagtgtggacaccgagggctgaccagtctggtggacgagttaggccgctgccatgaagaatgtccggtcgaggaaggaatatgacacacgttctgcgcgccagaaggctgctgactgaagagggatggctcgatgaccatcagttgcgtattgctgacggtgtcatcgcagcaatcgaaccgattccagcgggcgtgactgaacgcgatgcggaactgctctgccctgcttacatcgacacccatgtacacggtggtgcgggcgttgatgtaatggatgacgcgccggatgtactcgacaagctggcaatgcacaaggcacgcgaaggtgtcggcagttggttaccgaccaccgtaaccacgccgcttaataccattcatgcggcgctgaaacgtattgctcaacgttgccaacgcggcggacctggtgcgcaagtgctggggagttatctcgaaggaccgtacttcacgccgcagaataaaggcgcgcatccgccggagttgtttcgcgagcttgaaattgccgagctggatcagttgattgccgtttctcagcacaccttacgtgtggtagcgctggcaccggaaaaagaaggggcattgcaggccatccgccatcttaaacagcaaaacgtaagggtgatgctggggcatagcgcggcgacctggcaacaaacccgcgccgcatttgatgctggtgccgacggcctggtgcattgctataacgggatgacaggtttacatcaccgcgaaccgggaatggttggcgcgggattaacggacaagcgcgcctggctggaactgatagccgatggtcatcatgtgcatccggcggcaatgtcgctgtgttgttgctgtgcgaaagagagaatcgtactgatcaccgacgcgatgcaggcagctgggatgccggatggtcgctatacgttatgtggtgaagaagtgcagatgcacggtggcgttgtccgtaccgcgtctggtgggctggcgggcagtacgctgtctgttgatgcggcagtgcgcaatatggtcgagttgacgggcgtaacgcctgcggaagccatccatatggcgtcgctgcatccggcgcgaatgctgggtgttgatggtgttctgggatcgcttaaaccgggcaaacgcgccagcgtcgttgcgctggatagcgggctacatgtgcaacaaatctggattcagggtcaattagcttcgttttgatagtttgctcctttattgggccttcacttcccccgtaaggcctttctttttctttcgttttgatctgtgcagcggtgtcggatgcgacgctaacgcgtcttatccgacctacagttggtgaccgcaaggccggataaagcgtttgcgccgcatccagcaatcccttttgcttcctttatcttttctttcaacgatcacaaatttcgttttatttcttttttctccattgaactttcagtttcttttctatagattttaatcaacgaaagacatcaccaagtgaaatgaaacgaaaggcaagtgaaagcgacaacgcccgacgtcaagttcatcagactaaggattgagttatgccagaaaattacacccctgctgccgccgcaaccggtacatggactgaagaagagatccgccatcagcctcgcgcatggatccgttcactcaccaacatcgacgcgctacgttccgcgctcaataacttccttgaaccgttactgcgcaaagagaatctgcggatcatcctgaccggagccggaacgtcggcatttatcggtgacatcatcgcgccgtggctcgccagccataccggtaaaaacttcagcgccgtaccgaccaccgatctggtcaccaatccgatggactacctgaacccagctcatccgctgctgttgatctccttcggtcgatccggcaacagcccggaaagcgtcgcagccgtggaactggcaaatcaatttgtaccggaatgctatcacctgccgatcacctgcaacgaagcgggcgctctttaccaaaacgcgatcaacagcgataacgcgtttgccctgctgatgcccgcagaaacgcacgatcgcggctttgcgatgaccagcagcattaccaccatgatggccagctgcctcgcggttttcgcacctgagacgatcaacagccaaaccttccgcgacgtggcggatcgttgccaggcgatcctgacctcactgggcgatttcagcgaaggtgtgtttggttacgcaccgtggaaacggatcgtttatctcggtagcggtggcttacagggcgcagcacgcgagtcggcgctgaaagtgctggaactgacggcgggtaaactggcggccttttatgattctccaaccggattccgtcatggaccaaaatcgctggtcgatgacgaaacgctggtggtggtatttgtctccagccacccttacacccgtcagtatgatcttgatctgctggctgaacttcgccgtgacaaccaggcaatgcgtgtaatcgccatcgccgcggaaagcagcgacatcgtcgctgccggtccacatatcatcctgccaccgtcacgtcactttatcgacgttgagcaggcattttgcttcctgatgtacgcccagacgtttgcactgatgcagtcgctgcacatgggcaatacgccggataccccatcagccagtggcaccgttaaccgcgtggtgcaaggcgtaatcattcatccgtggcaggcataagaggatcgcattatgagcattatctccactaaatatctgttacaggacgcccaggccaatggctacgcggtgcctgcttttaacattcataacgccgagacgatccaagcgatcctcgaagtgtgcagtgaaatgcgatcgccggtgatcctcgccggaacgccggggacctttaaacacatcgcgctggaagagatctacgccctgtgtagcgcctattccacaacctacaacatgccactggcgctgcatctcgaccaccacgaatcgctggatgatattcgccgtaaagtccacgcaggtgtgcgcagtgcgatgatcgacggcagccacttcccgtttgccgagaacgtgaagctggtgaaatcggttgttgacttctgccactcacaagattgcagcgtggaagcagaactgggccgcctgggcggtgttgaagatgacatgagcgttgacgccgaaagtgcattcctgaccgatccacaagaagctaaacgctttgtcgaactgactggcgtcgacagcctggcggtagcgattggtacggcgcacggcttatacagcaaaacgccgaagattgatttccagcggctggcggaaattcgtgaagtggaggatgttcctctggtgctgcatggtgccagcgatgttccggatgaatttgtccgtcgcactattgaacttggcgtcacaaaagtgaacgttgccacagaattaaaaatagccttcgctggcgcggttaaagcctggtttgcggaaaatccgcagggtaatgatcctcgttattatatgcgcgtcggaatggatgcgatgaaagaagttgtcagaaataaaattaatgtctgtggttcagcgaatcgaatttcagcataatcattagttttttatgatttatcccaatgtacttcccgattaatatcggggagtgccttaatggaaaaggagataactaaaccttaataaatacatcactacaatatcgcaacaataatatatttaaaaaaattatattattcaactttatggtgaggattacacaatgaccagtccaaatattctcttaacccgtattgataaccgtctggttcacggtcaggttggcgtgacctggacatccaccatcggtgcaaatctgctggtagtcgtggatgatgttgtcgctaacgatgatattcaacagaaattaatgggtattaccgcggaaacctacggctttggcattcgtttctttactatcgaaaaaaccattaacgtcatcggcaaagctgcaccacatcagaagatcttcctgatttgccgtacgccacaaacggtacgtaaattggtagaaggtggtattgacctgaaagatgtcaacgtcggcaatatgcatttctcggaagggaaaaagcaaatcagcagtaaagtttatgtcgatgaccaggatctcacggacttacgttttattaaacaacgtggcgtgaatgttttcattcaggacgtccctggcgatcaaaaagaacaaatccctgactaaatctaaaatcgccttaatattggtttgaggtaataaaaatgcatgaaataaccctacttcagggattatccctggcggcgttagtttttgttctggggattgatttttggctggaagccttatttttattccgcccgataatcgtttgtaccctaactggcgctattctcggtgatattcagactggcttaattaccggtggtctgacagagttggctttcgccggattaacccctgcaggtggtgttcagccgcccaacccgattatggcgggtctgatgaccaccgtcattgcatggtctacgggcgttgatgccaaaacagcaattggtcttggcctgccgtttagtttgttaatgcagtacgtcattctgttcttctattccgctttctcattatttatgaccaaagccgataaatgcgcgaaagaggcggatacggcagcgttttcccggcttaactggacaacgatgctcatcgtcgcttcagcgtatgcggtgattgctttcctctgtacttacctggcacagggggcgatgcaggcgctggtgaaagcgatgcccgcctggctgacccacggctttgaagtggctggcggtattctgcctgccgttggttttggcttgctgctgcgcgtaatgttcaaagcgcaatatatcccttacctgatcgccggtttcctgtttgtttgctacatccaggtcagcaacctgttgccggttgccgtactgggcgcaggctttgcggtgtatgagtttttcaatgcgaaatcccggcagcaagcgcaaccgcagcccgttgccagtaaaaatgaagaagaggactacagcaatgggatctgaaatcagtaaaaaagatatcacccgtctgggctttcgttcgtcgctgctgcaagcgagctttaactacgaaaggatgcaggcgggcggttttacctgggcgatgttgccgatcctgaaaaagatttataaggacgacaaaccgggcttaagcgcggcgatgaaagataacctcgaatttattaatacccacccgaatctggtcggattcctgatggggttattaatttcgatggaagaaaaaggagaaaaccgcgacaccattaaaggcctcaaagtggcactgtttggcccaatcgccgggattggcgatgcgattttctggtttactttgttgccgattatggcgggaatttgctcatcatttgccagccagggaaacctgctggggccgattctatttttcgccgtttacctgcttatctttttcctgcgcgtcggctggacccacgtcggttattcagtcggcgtgaaggcgatcgataaagtgcgagagaactcgcagatgattgcccgttcggcaaccatcctcgggatcacggtaatcggcgggctgatcgcttcgtatgtgcatattaacgtggtgacatcgtttgccatcgacaatacccacagcgttgcgctgcagcaggatttcttcgataaagtcttcccgaacattttaccgatggcctacaccctgctgatgtattacttcctgcgggtgaaaaaagcgcatccggtgctgttaatcggcgtgacttttgtgctctctattgtttgttccgcattcggcattttgtaaatggaacgaggcactgcgtctggtggtgcctctttacttaaggaatttcatcctgtgcaaacccttcagcaagttgaaaactatacggcgttaagtgaacgtgccagcgaatatttattggccgtgatccgtagcaaaccgaatgccgtgatttgcctggcgaccggagccacgccattactgacgtatcattatctggtagaaaaaatccaccagcagcaggttgatgtcagccagctcaccttcgtgaagctcgacgaatgggtggatctgccattaacgatgccaggcacctgcgaaactttcctgcaacagcatatcgtgcagccgctggggctacgtgaagaccagctcatcagctttcgctccgaagagataaatgagacagagtgcgaacgggtaacgaacctgattgcgcgcaaaggcggtctggatttatgcgttctcggattggggaaaaacggtcatcttgggctgaacgaaccgggagaaagcctgcaaccggcctgccatatcagtcaacttgatgccagaacacagcaacatgagatgttaaaaaccgcgggtcgccccgtgactcgtgggatcaccttaggcctgaaggatattctcaatgcccgcgaagttttgttactggtgactggcgaaggaaagcaggatgcgacagatcgttttctcacggctaaagtctctaccgctatcccggcttcatttttatggctgcacagtaactttatttgtttaattaacacctaaccagatgaaaaatttgctcaaaatgtttaaattaacttatgtaacagtcacgcattatattaaataacatttgactgggttgaacataacgccgatagcaaaaggagttatgttcaacaatttaattttagatatacatataacttgttctattaataaatcacctcgtattctgactcgccccctggcgcagcaaagtcaggcatttatactcttttgaatacatagaaaattgatatcaatataatgaaaatatcaaatatttgcatataaatataatcttaaagttcagtctatttaatgttcaatgaaatatttctgcctgtataatctttaaagatgttgaacatatattcacattaaatatgattatgtacttgttacaaggataaggttatatatgaataaagttacaaaaacagctattgcgggcttacttgcgcttttcgcaggtaatgccgctgcaaccgatggtgaaatagtttttgatggcgagattttaaaatccgcttgtgaaatcaatgactctgataagaaaattgaagttgctcttggtcactataatgccgaacagtttcgtaatattggcgagcgtagcccaaaaattccattcactattcctttagttaactgcccaatgactgggtgggagcacgataacggcaacgttgaagcgtctttccgtctatggctggaaacgcgagataatggcaccgtccctaacttccctaatctggcaaaagtaggctcttttgctggcatagcggcaacaggtgtgggtatccgtattgacgatgcggaaagcggaaacattatgccactgaatgctatgggcaatgataacacggtttatcagatcccggcggaatccaatggtattgtcaatgttgacctcatcgcttactacgtatcaaccgtagttccatcagaaatcaccccaggggaagcagacgctatcgttaacgtaacgctggattaccgttaatacgttagggcgttatctgacctgtcagataacgcccttttccttcctctttctcgttgtatcaggttgaaaaataactatgtcaaaacgaacattcgcggtgatattaaccttgttgtgtagcttctgtattggccaggcgcttgcaggaggaatcgttttacagcgaacgcgagtgatctatgatgccagccgcaaagaggctgcgttacctgtcgcaaacaaaggcgcagaaacgccttatttactgcaatcatgggtagataatatagatggtaaaagccgtgccccatttattataaccccaccgctatttcgtcttgaggctggcgatgactcatcactgcgaattattaaaacagctgataacctgcctgaaaataaagagtcgctgttctacattaatgttcgtgccattccagcaaagaaaaaatcagatgatgttaatgctaacgagttgacgctggtatttaaaacacggatcaaaatgttttatcgccccgcacacctgaagggacgggtaaacgatgcgtggaaatcactggaatttaaacgtagtgaccattcactcaatatatataacccaactgaatattacgtcgtatttgccggactggcagtcgataaaaccgatctcacaagcaaaattgaatatatcgcgcccggagaacataaacagttaccacttcctgcatctggcggaaagaacgtgaaatgggctgcgatcaatgattatggcggcagttccgggacagaaactcgtccactgcaataaaaaatataaaaacacaggtcatcagggaatgccacaacgacaccaccagggacataaacgcacaccgaaacagttggcgctcatcatcaaacgttgtttgccgatggtgctcactggcagcggcatgctttgcactaccgctaacgccgaagagtattatttcgaccccattatgctggaaaccacaaaaagtggtatgcaaacaaccgatctgtcgcgtttttcaaaaaaatatgcacaactaccaggaacttatcaggttgatatctggctgaataaaaagaaggtttcacagaaaaaaattacatttaccgccaatgcagagcaacttctgcagccacagtttacggtagaacaactacgtgagctgggtattaaggtggatgaaatcccggcgctggctgaaaaagatgacgatagcgtgatcaactcgcttgaacaaatcattcccggtacagctgctgaatttgatttcaatcatcagcaacttaatttgagcattccccaaattgcactgtaccgtgatgcaagaggttacgtctccccttctcgttgggacgatggtataccaacgctgtttaccaactactcgtttacaggttctgataaccgttaccgccagggcaatcgtagccaacgacagtacctgaatatgcaaaatggtgctaattttggcccctggcgattacgcaactattccacatggacacgcaacgatcagacatcaagctggaataccatcagtagttatttacaacgtgatatcaaggcgttgaagtctcagttgcttctgggagaaagcgccaccagcggcagtattttttccagctacacctttactggcgtgcaactcgcttccgacgataatatgttgccaaacagccagcgcggatttgccccaacggtacgcggtatcgcaaacagtagtgcaatcgtgactatcaggcaaaatggttatgtgatctatcaaagcaacgtgtcagcgggtgcctttgaaattaacgatctctacccctcttccaacagcggcgatttagaagtcacgattgaagaaagtgacggtacacaacgtcgctttatccagccttattcttcattacccatgatgcagcgacctgggcatctaaagtatagcgcgaccgctggacgctatcgcgctgatgcaaacagtgatagcaaggaacccgaatttgctgaagccacggcaatatatggtttgaataatacttttacgctgtatggcggcctgctcggttctgaagattattatgcgctggggatcggtatcggcggcacacttggcgcactgggcgcgttgtcgatggatatcaacagagctgacacccaattcgataaccagcactcttttcatggctatcaatggcgtacgcagtacatcaaagatatcccggaaaccaacaccaatatcgctgtcagctactatcgctataccaacgatggctattttagttttaatgaagccaatacccgcaattgggactataacagtcgccaaaaaagtgaaattcaattcaacatcagccagacaatatttgatggggtaagtctgtatgcctccggttcgcagcaagactattggggcaataacgataaaaacaggaatatctctgttggggtttccggccagcaatggggagttggttacagcctgaattatcaatacagccgctacactgatcaaaataatgaccgcgcactctctttgaatctcagtattccgttagaacgctggttaccgcgtagccgggtttcctatcagatgaccagccagaaagatcgcccaacccaacatgaaatgcgtcttgatggctcactgctggatgatggtcgcctgagctatagcctggaacaaagtctggatgacgataacaaccataacagtagcctgaacgccagttaccgttcaccttatggcaccttcagtgccggatacagctacggtaatgacagcagccaatacaattacggcgttaccggcggcgtggttatccatcctcatggcgtgacgctctcgcaatatctgggcaacgcttttgcgcttatcgatgctaacggagcatctggcgtgaggatacaaaactatccggggattgctaccgatccttttggctatgcagtggttccttatctcacaacttatcaggaaaaccgtctctcggtagatactacgcagctgcccgataacgtcgatcttgaacaaacaacacagtttgtggtgcccaacagaggtgcaatggtagcggcgcgtttcaacgccaatatcggttatcgcgtacttgttacagtcagcgatcgcaacggtaaaccgttgccctttggcgctcttgccagcaacgatgatacaaggcaacaaagtatcgtcgatgagggcggcatactatatctctctgggatatcgagtaaatcacaaagctggactgtacgctggggaaatcaggcagatcaacaatgtcagtttgctttcagtacaccggattcagaacctacaacctctgtattacaaggcacagcgcagtgccattaaggataaaaaaatgaaaagagcgcctcttataacaggtcttttgttgatatccacatcctgcgcttatgcctcctcaggagggtgtggagccgacagcactagcggtgcgacaaattacagcagtgtggttgatgatgttacggtgaaccagacagataacgtgacaggacgggagtttacctctgcaacgctaagtagcactaactggcaatacgcctgttcctgctctgcgggtaaggcagttaaacttgtctatatggtcagccccgtacttaccaccactggacatcagacaggatattacaaactcaatgacagcctggatattaaaaccacattacaggcaaacgacattccaggactcacaaccgaccaggttgtctctgttaacacccgattcacacagataaaaaacaacacggtatattctgctgcaacccaaacgggtgtttgccagggtgatacgtctcgttatggacccgttaatattggtgcgaacaccacctttaccctgtatgtcaccaagccatttctcggctcgatgaccattccgaaaacggatattgccgtcattaaaggcgcgtgggtcgatggaatgggaagcccgtctacaggtgacttccatgatttagtcaagttatcgattcagggaaatctcaccgccccacagtcgtgcaaaattaatcagggcgatgttattaaggttaattttggattcatcaatggtcagaagtttaccacccgcaatgccatgccagacggttttactccagtagactttgatatcacttatgactgtggtgatacttcaaagattaaaaactcgttgcaaatgcgcatcgacggtacaactggggtagtagaccagtacaacctggtcgccaggcgaagaagttcagacaatgtgcccgatgtcggtattcgtattgaaaatctcggcggcggagttgcaaatattccttttcagaacggtatccttcccgttgatccttccgggcatggcaccgtcaatatgcgcgcctggccagttaatctggtcggtggtgagctggaaacaggaaaatttcagggcacagccaccattaccgtcatcgtgcggtaaaagaagacgttgcgttttgattaacgcaacgcttcggcactgttacccctgctgctccagcgcatacttatacagcgcatttttcttcacgccgtgaatttctgcggccagcgccgccgcttttttcagcggcagttctgcctgtagcagcgccagcgtgcgcagggcatcggcgggtaagtcttcttcctgtgctttatgaccttcgacaatcagcaccatttcgcctttgcgacggttttcatcttcctttacccacgccagcagctcgccaacgggcgcgccgtgaatggtttcccaggttttggtcagctcacgcgccagaaccacgtagcgggattcgcctaataccgcaacgatatcttccaggctatctaacagacggtgggtagattcataaaaaatcagcgtgcgcggctccgcttcaatggcttttagcgcatcacggcggccttttgatttggcaggtaaaaagccttcgtaacagaaacggtcagagggtaaacccgctgcgcttaacgcagtgatagcagcacacggcccgggtagcggcaccacgcggatccccgcttcacggcaggtacgcaccagatggtagccaggatcgttaattagcggcgttccggcatcggaaaccagcgcaatgttttgcccctcttgcagcttcgccagcagcgtttcagctttttgttgttcgttatggtcgtgcagcgcaaacaaccgggcattaatcccaaaatgttgcagcaataaaccggtgtgacgagtatcctcggcggcaatcagatcaacggcctgtaatacctctaacgcacgctgggtgatatccgccagattgccgattggcgtcggtacaatgtaaagctggccctgagaattatccgccgattggtgttgtttcattgtgtcgtccgtattgccgatttaatattgagcattgcgtaaaaaaaatatcactggatacattatggtaccctcaacattttctcgtttgaaagccgcgcgttgtctgcctgttgttctggcagccctgattttcgccggttgtggcacccatactcccgatcagtccactgcttatatgcagggcacggcgcaggctgattctgccttttatcttcagcagatgcagcaaagctctgatgataccaggatcaactggcaattactcgccattcgtgcactggtgaaagaaggtaaaaccgggcaggcggttgagttgtttaaccaactaccgcaagaactgaacgatgctcagcgtcgcgagaaaacactgctggcggtagagattaaactggcgcagaaagattttgctggcgcgcaaaacttgctggcgaaaatcacacctgccgatttagaacaaaaccagcaagcgcgttactggcaggcaaaaatcgatgccagccaggggcgtccttccattgatttactgcgcgcgttaattgctcaggaaccgctgcttggcgcgaaagaaaaacagcagaatattgatgccacctggcaggcgctctcctccatgactcaggaacaggcgaatacgctggtgatcaacgccgacgaaaatattctgcaaggctggctggatctgcagcgcgtctggtttgataaccgtaacgatcccgacatgatgaaagccgggatcgccgactggcagaaacgttatccgaacaatccgggcgcgaaaatgctgccaacgcagttggttaacgtaaaagcgtttaaaccagcctcgaccaacaaaatcgccctgctgttgccactgaatggccaggcagcggtatttggtcgcactattcagcaaggctttgaagcggcgaaaaatatcggcactcagccagtggcagctcaggtagctgccgcacctgccgcagacgtagctgaacaacctcagccgcaaaccgtggatggcgttgccagcccggcacaagcctcggttagcgatctgaccggtgaacagcctgcagcccagccggtgcctgtaagcgccccggcgacaagcaccgcagcggtaagcgcacccgcaaatccatccgcagagctgaaaatctacgatacctcatcacaaccacttagccagatcttaagccaggttcagcaggatggcgcgagtattgtggtcggtccgttgctgaaaaataacgttgaagagttgctgaagagcaacactccgctgaacgtactggcactgaaccagccggagaatatcgaaaatcgcgtcaatatttgttacttcgcgctttcaccggaagacgaagcgcgcgatgcagcgcgtcatattcgtgaccagggtaaacaagcgccgctggtgctgatcccacgcagttcattgggcgatcgcgtagccaatgcgtttgcgcaagagtggcagaaactgggcggcggcaccgttctgcaacaaaaatttggttccaccagcgaattacgcgcgggtgttaacggcggttctggtattgctttaacgggtagcccgattactctcagagcgacaaccgactccggcatgacgaccaacaatccaacgctgcaaaccacgccaaccgatgaccagttcaccaataatggcggtcgtgtcgatgcggtgtacattgtggcaacgccgggtgaaatcgcttttatcaaaccgatgatcgccatgcgtaacggtagccagagcggtgcaacgctgtacgccagctcccgcagtgcgcaagggaccgctggcccggatttccgactggagatggaaggcttgcagtacagcgaaatcccgatgctggcaggcggtaatctaccgttaatgcagcaggcactcagcgcggtgaataacgattattcactggctcgcatgtatgcgatgggcgtcgatgcctggtcgctggcaaatcatttctcacaaatgcgccaggttcagggttttgaaatcaacggtaataccggaagcctgacggctaacccggattgcgtgattaacaggaacttatcatggctacagtaccaacaaggtcaggtagtccccgtcagttaaccaccaaacagaccggcgatgcgtgggaagcacaagcgcgtcgctggctggaaggcaaaggactgcggtttatcgccgctaacgtgaacgagcgtggcggcgagatcgatctgataatgcgtgaaggccggaccaccatttttgtcgaggtacgctatcgccgctctgcgctttatggcggcgcggcagccagtgtgacccgcagcaaacaacacaaattattacagactgcccgcttgtggctcgcgcgtcataatgggagttttgatactgtggattgccggttcgatgtggtagccttcaccgggaatgaggttgagtggattaaggatgcctttaatgaccactcataattaaggtttaaggattagcgtgcaagaaagaattaaagcttgcttcactgaaagcattcaaactcaaattgcggcggcagaggcgcttccggatgccatctcccgtgcagccatgacgctggttcagtctctgctcaatggcaacaaaatcctctgttgtggtaatggaacttccgctgccaatgcacagcattttgctgccagcatgatcaaccgtttcgaaacggagcggcccagcttacctgccattgcactaaatactgataatgttgtcttaacggcgattgccaacgatcgcttacatgatgaagtgtatgcaaaacaggtgcgggcgctgggtcatgcgggagatgtattgttagccatttccacccgtggcaacagccgcgatattgttaaagcagttgaagccgccgttacgcgtgatatgaccattgtggcattgaccggctatgacggcggcgaacttgcaggtttgttagggccacaggatgtggagatccgcattccttcgcatcgtagtgctcgcattcaggaaatgcatatgctgacggtaaattgcctgtgcgatctgatcgataacacgcttttccctcaccaggatgattaaggagaatacatgaaggcattatcgccaatcgcagtccttatttccgcgctgctgttgcaaggttgtgttgccgctgccgtagtgggtaccgctgctgtgggtaccaaagccgcaactgacccacgcagtgtcggcacccaggtggacgatggtaccctggaagtgcgcgtgaacagcgcattgtcgaaagacgaacagattaagaaagaagcgcgcattaatgtaacggcctatcagggcaaagtgctgctggttgggcagtcaccaaatgctgaactttcggctcgcgccaaacagattgctatgggcgtagacggtgccaacgaagtgtataacgagattcgtcagggccagccgattggtctgggcgaagcatctaacgatacgtggatcaccaccaaagtgcgttcgcagctcttaaccagcgacctggtgaaatcgtccaacgtgaaagtgaccaccgaaaacggtgaagtgttcctgatggggctggtgactgaacgtgaagcgaaagcggcggcagatattgccagccgggtgagcggcgtgaagcgggtaactacggcgtttacgtttattaaatagcagccccttgtaatgcctgatgcgacgcttgccgcgtcttatcaggcctacaacgatacaaaccgtaggtcagataaggcgtttacgccgcatccgacatgttttccctcaaatcagaacaacagcgccagcccgccgacaatcacaccagacactgccaccatcgcccctgtcagccataaggctttcgccgggaacgctttgcgcagcataatcagtgacggcaaactcactgccgggagcgtcatcaacaatgccagcgccggagcggttcccatacctgccagcatcatcgtttgtacaatcggaatttctgctgccgtgggaatgacaaacaagcatcctgctaccgccatcgccaccacccacatcaggctgttatcgacagcaccatcggcatgggggaataaccagacgcgagcggcacccaacaccagtactgcaaggatgtaaaccgggatcgtactccagaaaagcgtccatagcgccctgccccagcggctaaaaaacccgccctgtgcttccggtatgtcaatttcgaccggtgcctgcgtttgcggtgtttcacgcacccatttttgcaccagcgtcgcaatcagcaacaccatcaccagcccggccaccagacgaatcgccgcaaaaccccagccgaggacaaagcccataaacaccagcgtcgccgggtttaacaccggattgcccatccagaatgccagcgcaccgcccatcgacacctgttggcgacgcattcccgccgcgaccggagccgcacagcaggtacacatcatgcccggcaacgaaaacagcgttcccagcagcgtgccgcgaaagcgcgattgcccaagcgtacgcaacaaccagtcacgcgggatcagcacctgaatcaacgaaccgaggatcacccccagcaccgccgctttccataccgcgaggaaatagatcatcgcgtaatccaacgccgcctgccatgggttagcatccgcctgcgcaaggatagatttaccgatactgtgggtttcggcagcagtaaacgctttgccgtagtaaggttcccatttcacataccagagaccggcaatgacaacgagaaagaaaagcgcgggtttccaccactgaatgggcgttgccgcctgagatgaagactgaccagtcatagcattccccaggaataagttatgataattgagcgcgtgaatattacgctcactatcaattcttgggaataattattcagctcttttgcgtaattctgaagagcttaaaatcgtcacgccttcatgctcaggccgcatcgactctgccagcatgacccgcgccacgtctctcgcatcaatggatttccagttacctggtaacaaacggaacagcggcgcaaaaagcgtttcgttcatccgctgtttgctacgagcgcccagtaacatcgacgggcgagcaatggtcaatttcggccagttctgggcgattaatgcttcttccatctcccctttgacgcggttatagaaaaacggcgagtgggcattggcacccatcgcactgactaccaacatatgctgcgcgcccagtcgccgcccggttaatgcggtatccactaccagcgtgtaatcggcatgaataaacgcctctttgctccccgcttctcgccgcgtggtgccgagacaacaaaacacaatgtcgatgggatcggtgacctgcgccaacgcgtcactcagttgcggatcatggggattaaacaccccgggcatatcgcccaacggacgtcgcgtcggcgcagcaatggcgttaactttcggttcgttaatcaacatccgcagcaggtgaccgcccaccagccccgttgcgcctgtaatcagtacctgactcatcttcgctcctttacagaattgtctgccttgcgctccacggctcatgcaccagtcttaatagaccatgaggtaattatccccgattgtgggaaattcgcctcatccaatgcaacaacgcggaggaagcatgagtaagaaaattgccgttttaatcactgatgaatttgaggattcagaatttacttcacccgcagacgagttccgtaaagccggacacgaagtgattaccattgaaaaacaagcgggtaaaacggtgaaaggcaaaaaaggagaagccagcgtgaccatcgataaatccatcgatgaagtgacgcctgcggagtttgatgccctgctgctaccgggcggccattcaccggattatctgcgtggggacaaccgttttgtcacctttacccgtgattttgtgaatagtggcaaaccggtgtttgccatctgtcacggcccgcagttgctgatcagcgccgatgtgattcgggggcgcaaactgaccgcagttaaaccgatcattattgatgttaaaaatgcgggcgcggaattttacgatcaggaagtcgtggttgataaagatcagctggttaccagccggacaccggacgatctgccagcgtttaaccgcgaggcgttacgcctgctcggtgcctgagtcgcgtagccaaatcatttttttaccaaagcccagcgtgttgtcggtgaatttgatttcatcgagccggatttcccacaccggggccgacagcattctggcaaccggaaagcgacgattgtacgccttgcgcgcgaggtcgctttcctcaccttccagcctgcggatctcacctttaaactgcacaccgcgaattaacgctaccgttttcggctgaccgtttaccgttccggcaaccgcagcctgcggcccactcatctgcgcgtggcgcgttttttcttccgtcaaaatgtagaaggcgactttctgcgcatcaaaaagataaaaggcattagcgcaccagagttccccttcctgctgcacacaccaagtgacaacatgttgttttgccagccaacggctgatggcgatgagtgtttccattgctgttctcttttatactgtgggcctgaccttaacatgcgacgcagacgatgacaccctggtttctttacttgatccgtaccgccgacaataagctttataccgggatcaccacggatgtcgaacgccgctatcagcagcaccaaagcggcaaaggggcgaaagcactgcgcgggaaaggagaactaacgctggtgttttccgcgccagtgggcgatcgttcgctggcgttacgggcggaatatcgcgttaagcaactgaccaaacggcaaaaagagcgtctggtagcggaaggcgcagggtttgcagagctgttaagcagtctgcaaaccccggagattaaaagcgattgaaatgctcgtgatactcaaccaggccggtaacgccattcagcgcgtcatccgctaaacgatgtacctggaaggcgctttcagtgcccggccagcggcaacgcagatcgtgatgcgccgccagttcaaagccgaaacgactgtacagcgccggatcgcccagcgtcaccactgcggcatagccgaactcattaagcgaatcgagtccttcatagaccagttggcgtgccagcccctgtccacggtatttttcatcaaccgccaacggtgccatgccgacccattgcaggtcttcgccctgcacatcaaccggactaaatgccacatagccaatgacctgaccttcgtcatctgtcgccaccagccccagcgtcagaaagccatcttcacgcagatcgtgaaccagcttcgcttccgcatcactttcgaatgagcgacgcagcagggcatcaatacccggcgcatcaatgggaatttctactcgaattagcatggttcacctaccgatgtctgtttggtttcaggcgcggttttcattcccgcctcaacaaaatccgccagttgcagcagcatcatgcgtaaggctttcggcatttgctccagttcaatggcgtccatcaggtttttcacatacagccccagctccgtatcgccttcaatcaccagccgacgctggaagaagagcgtatccggatcttgtttacgcgccgcaatcatcagcagatcgctggcgtcggcactaaaactcacatcagcttgcgcgttctggctaacgaccagtttgccattcaccaccgaggtaaaccattgcaggtcaatatcacgcacatgaatacttaaccagcggccttcaagaaactccagctcgccatcatccagcgcctggcggaattgccagcttaagacctgctcaagaacctggcgttttagcgcaaatggcgtcagttttaccggtacactcaacagagatggccccaaatgcacaatacgggaacgcagtttatccaacacgagttttactccctgtttcaacaatcatcctattttgccatatcagaaaaataacatagcggtataaatcaacaattccatatgaaattgctgctaccaccaatacaactttaactgccttaaatcaaaaattgtcgcagcaaggttaactaaaatcccagttcgttaacatttttgcgttttgatagcgcaaccttcaggaaaaattatggagctgctctgccctgccggaaatctcccggcgcttaaggcggccatcgaaaacggcgcagatgctgtttatatcgggctaaaagatgataccaatgcccgtcacttcgccggccttaactttaccgagaaaaaattgcaggaagcggtgagttttgtccatcaacatcgccgcaaacttcacatcgcgattaacacttttgcgcatccggacggttacgcccgttggcagcgcgccgtggatatggcggcgcagctgggtgccgacgcgctgatcctcgccgacctcgccatgctggagtacgccgccgagcgttatccgcatattgagcgccacgtatcggtgcaggcttcggcgaccaatgaagaggcgattaacttttatcatcgccattttgacgttgctcgcgtggtgctgccgcgcgtgttgtcgattcatcaggtgaaacaactggcacgggtcacacctgtaccactggaagtctttgctttcggcagcctgtgcattatgtcggaaggtcgttgctatctgtcgtcgtatctgacgggtgagtcgcccaacaccataggcgcgtgttctccggcccgtttcgtgcgctggcaacaaacgccgcaggggctggaatcccgcctgaacgaagtgctgatcgaccgttatcaggacggcgaaaacgcaggttatccgacgctatgtaaagggcgttatctggtggacggcgagcgctatcacgcgctggaagaaccaaccagtctcaataccctggaactgctgccggagttaatggcggcgaatattgcttcggtgaaaattgaaggccgccagcgtagcccggcgtatgtcagccaggtggcgaaagtctggcgtcaggctatcgaccgttgtaaggccgatccgcaaaactttgtaccgcaaagcgcgtggatggagacgctcgggtcgatgtccgaaggcacgcaaaccactcttggcgcatatcaccgtaaatggcagtgagaaaagcaatgaaatattccttagggccagtgctgtggtactggccaaaagagacgctggaagaattttatcagcaggccgccaccagcagcgccgacgtgatttatcttggtgaagcggtatgcagcaagcgtcgggcaaccaaagttggcgactggctggagatggcaaaatcgctcgccgggagtggtaagcagattgtgctctccacgctggcgctggtgcaggcatcatctgaactgggcgaactgaaacgctatgttgagaacggtgagtttctgattgaagccagcgatctcggcgtggtgaatatgtgcgctgaacgcaaactgccgttcgtcgccgggcacgcgctgaactgctacaacgcggtgacactgaaaatattgctcaaacagggcatgatgcgctggtgtatgccagtggagctttcccgcgactggctggtgaatctgcttaatcagtgcgatgagctgggcattcgtaaccagtttgaagtggaagtcctgagctacggtcatctgccgctggcctactccgcccgctgctttaccgcgcgttcggaagaccgcccgaaagatgagtgtgaaacctgctgcattaagtatccgaacgggcgcaacgtgctgtcgcaggaaaaccaacaagtgtttgtactcaatggcattcagaccatgagcggctacgtttacaacctcggtaacgagctggcatccatgcagggcctggttgatgtggtccgcctgtcaccgcagggtactgacactttcgcgatgctcgacgccttccgcgctaatgaaaatggcgctgcaccactgccgttgacggcgaacagcgactgtaacggctactggcggcggctggcaggactggagctgcaagcctaagtaaatagctcactttgttaacaactttaactactctttaatgcagtattaaagattaatcggtaacaaagtgagctgttatgactgataaaaccattgcgttttcgctactcgatctggcccccattcccgaaggttcttcagcgcgagaagcattctcccactctctcgatctcgcccgtctggctgaaaagcgcggctatcatcgctactggctggcagaacaccacaatatgactggcattgccagtgctgccacgtcggtattgatcggctatctggcggcgaataccaccacgctgcatctggggtctggcggcgtgatgttgcctaaccactcaccgttggtcattgcagaacagttcggcacgcttaatacactctatccggggcgaatcgatttggggctgggtcgtgctccgggtagtgaccaacggacaatgatggcgctacgtcgtcatatgagcggcgatattgataatttcccccgcgatgtggcggagctggtggactggtttgacgcccgcgatcccaatccgcatgtgcgcccggtaccaggctatggcgagaaaatccccgtgtggttgttaggctccagcctttacagcgcgcaactggcggcgcagcttggtctgccgtttgcgtttgcctcacacttcgcgccggatatgctgttccaggcgctgcatctttatcgcagcaacttcaaaccgtcagcacggctggaaaaaccatacgcgatggtgtgcatcaatattatcgccgccgacagcaaccgcgacgctgaatttctgtttacctcaatgcagcaagcctttgtgaagctgcgccgtggcgaaaccgggcaactgccgccgccgattcaaaatatggatcagttctggccaccgtctgagcagtatggcgtgcagcaggcgctgagtatgtcgttggtaggtgataaagcgaaagtgcgtcatggcttgcagtcgatcctgcgcgaaaccgacgccgatgagattatggtcaacgggcagattttcgaccaccaggcgcggctgcattcgtttgagctggcgatggatgttaaggaagagttgttgggatagtgtgtcttaacgcgggaagccttatccgagctggcaacgctgtcctacatagacctgataagcgaagcgcatcaggcattgtgtaggcagcagaaatgtcggataaggcaccgctgattactgatacaccggcagtaaattaaagctcgataaaatatgcaccagtgcgttgccgacgccaaacaccagaatcagcgcaatcatcggcttgccaccccagacgcggaatttcgggctgccaaagcgtttacgcgatgcacgggctaacagcgccggaacaattgccgcccagatggtagccgctaaaccagcataaccaatggcgtacaggaatccgttcgggaacaacagcccccccacaactggcggggcaaaggtcagcaatgccgttttcaagcggcccacagccgagtcgtcgaaaccaaacagatctgccagatagtcaaacaaacccagcgttacgccgaggaacgaactcgctaccgcaaagtttgagaacacgaccagcagcagatccagactacggctgttcagtacgccgcttaacgcctgtaccagcacatcaatattaccgcccttctctgcaataccgataaactccggacgcgggatgttacccatcgtcgccagcaaccagatggtatacagcgccagcgccatcagcgtaccgtacaccagacatttcacgatggttttcggatctttgccgtaatacttcatcaggcttggcacgttaccgtgataaccaaacgatgccagacagaacggcagggtcatcaacagatacggtgcataagacgcattgctttcggcgacgttgaacaatgtcgcaggctgcacatgccccagcaggctaccaaaggtgaggaagaaggtaatgactttcgcccccagcacaatcgctgtcatgcgactgacggctttagtgctcaaccacaccacaaacgctaccagcaatgcaaaaccaaaacccgccgcccgtgccgggacgtttagtgacatctctgcgaaggtgtgatgcagaatcgaaccactggcagaaatataggcataggtcaggatatagagcacaaaggcaatggaaatgccgttgaccacgttccagcctttgcccagcaaatctttggtgatggtgtcaaaactcgaaccgattctgtaattcaggttagcttccagaatcatcaagccggaatgcagcatacagaaccaggtaaagatcagcgccgccattgaccagaaaaaccacgccccggacatgaccactggcagagaaaacatccctgcgccaataatggtgccgccgataatcaccacgccgccaagcagcgacggtgacgtttgggtggtggttagtgttgccatgagggcttctctccagtgaaaaatagtgcgactgcgttgttatgcattgcactgtaccagtacacgagtacaaaagacagaaaaaaagccccgatggtaaaaatcggggctgtatatattattttacagattgtgttcgctgttcagcgatgattacgcatcaccaccgaaacgacgacgaccggtagaatcatcacgacgcggagcgcggccttcacgacgttcgccgctaaaacgacgaccatcaccacggccaccttcacggcgttcaccgctgaagttacgaccgccttcacgacgttcgccaccgaaaccacgaccaccgccacgacgctcaccgccagtatgcggctgtgcatcgcccagtaactgcatgttcatcggcttgttgagaatgcgagtgcgcgtaaagtgttgcagcacttcacccggcatacctttcggcagttcgatggtggagtgagaagcaaacagcttgatgttaccaatgtaacggctgctgatgtcgccttcgttagcaatcgcaccaacgatatgacgaacttcaacaccatcatcgcggcccacttcaatgcggtacagctgcatatcgccaacatcacgacgttcacgacgcggacgatcttcacggtcaccacgcgggccacggtcgttacgatcgcgcggaccacggtcatcacggtcacggaattcacgtttcggacgcatcggcgcatctggcggtacgatcagagtacgttcaccctgtgccattttcagcagtgccgcagccagagtttcgagatccagctcttcaccttcagcagtcggctgaattttgctcagcagtgcgcggtattgatccagatcgctgctttccagctgctgctgtactttagcggcgaatttttccagacggcgtttgcctagcagttctgcgttcggcagttctacttccggaatagtcagcttcatagtacgttcaatgttgcgcagcagacgacgctcgcggttctcaacgaacagcagcgcgcggccagcacgacccgcacgaccggtacgaccgatacggtgaacgtaagactcagaatccatcgggatatcgtagttaactaccaggctgatacgctcaacgtccaggccacgggctgcaacgtcggtcgcaatcaggatgtccagacgaccatctttcaggcgttccagtgtctgttcacgcagcgcctggttcatgtcaccgttcagcgcggcgctgttgtagccgttacgctcaagagcttcagccacttccagagtcgcgtttttggtacgaacgaagataatcgccgcatcaaaatcttccgcttccaggaaacgtaccagtgcttcgtttttgcgcataccccagacagtccagtagctctggctgatgtcaggacgggtagtcacgctggactgaatgcgcacttcctgcggctctttcataaagcggcgggtaatgcgacgaatcgcttccggcatggttgcagagaacagagcggtctgatgaccttccgggatctgcgccataatggtttcaacgtcttcgatgaagcccatgcgcagcatttcgtcagcttcatccagaaccagaccgctcagtttagagaggtccagagtgccacgtttcaggtggtccagcagacggcccggagtaccgacaacgatctgcggcccctgacgcagggcgcgtaattgcacgtcataacgctggccgccgtacagagcaaccacatttacgccgcgcatgtgtttagagaaatccgtcattgcttcagcaacctgtaccgccagttcgcgggtcggtgccagcaccagaatctgtggtgctttcagctcaggatcaagattctgcaacagaggtaaagagaatgctgcagtttttccgctccccgtctgggccatacccagaacgtcgcggccattcagcagatgtggaatacactctgcctgaattggagatggtttttcgtaacccagatcgttaagggcttcaaggataggagccttcaggcccagatctgcaaaagtggtttcgaattcagccatgtagtacgtgtgcctcaaaattaatggcggccagtctacataactcatcatgaaattgatcagcaattttcattgaaaagtgtgaaccggctcaaagtaggtgtattaacgaacaacaacgccctcacccgttaaggtgatggcaatcaaaaaagattacgggctgatgtgtacgtcagctattgctggtccgattctgccaggtcatcttggtcctggcccaggagcgataattccaacaatgcgtatcggtgctcaacaaagttatgaacgttgttggcaaccgccagtttgaacagtgccgtggcgctgtccaaatcccccagacttaggtagtacttacctaaatagaagttggtttcactgagatgctcagcgagcgaggtgttatccgttgcgtccgccttgagcctttccattaacgtttgttcgctaatgttgcccaggtagaactcgacaatgttccatccccactgttccttatccgatttttcgaagtgctgtttcaacacttctttagcctgcttctcatcgagcttctgctcggcgagataaagccacagactacggaaaggatcattgggatcgtcttgataaaacgccagcagatcatcttgcgctaacttgtcacgaccgccgtaatataatgcgatcccgcgattcaagtgcgcgtagttgtaagttggatcaagctcaagtacagaatcaaacgcttcataggcagcatcaaaattgcctgcctgcgttaaatatatgcctaagtaattgaatacttcaggcatatccggtcggattgccagcgcttgcgaaaaatcgttacgcgctaatgccctcagaccgagactatcatacaacactccgcgctcatataaaagctgtgcgcgttcgtcatcggttaaagcccgactggcaaggatttgttccatacgtgccagaatcacttcctgctgtaaagtcggttgcaatggtaccgcgaggacttcacttttacgccaggaagtattactgcatcctgcaagcgtaagtgctgtcgcaacgaaacaccagcgcaaaaaaggcttcatttcccactcccgaagaccacggttgaatgaacgtcctgttcccggttgctaacaaggcgtcctgcccggttaaaagccccccgccgcagcggagggcaaatggcaaccttactcgccctgttcagcagccggagcttccggtgctgcagcaggttgagactgctcagtcgcttctttaatgctcagacggatacggccctggcgatcaacttccagaactttcaccggtacttcctgacccatctgcaggtaatcggtcactttctcaacgcgtttgtcagcgatttgagagatgtggaccagaccttctttaccgccgccgatggcaacaaatgcgccaaagtcaacgatacgggtcactttaccagtgtagacgcggctcacttcgatttctgcagtgatctcttcgatacgacgaatagcatgtttcgctttctcgccgtcggtcgctgcaatcttcacagtaccgtcatcttcgatttcgatggtggtgccagtttcttcggtcagagcacggattacagaaccgcctttaccgataacatctttgatcttgtccgggttgatcttgatggtatggatacgcggtgcgaactcagagatatcgccacgcggcgcgttgatcgcctgttccattacgcccaggatatgcagacgcgcacctttagcctggttcagcgcaacctgcatgatctctttggtgataccttcaattttgatatccatctgcagtgcagagataccgtcgcgggaacctgcaactttgaagtccatatcgcccaggtgatcttcgtcgcccaaaatgtcagacagtacaacgtagttgtcgccttctttcaccagacccattgcgatacccgcaacggcagctttgatcggcacacctgcgtccatcagcgccagagacgcgccgcacacggaagccatagaagaggaaccgttggattcagtgatttcagacacaacacgtacggtgtacgggaatttgtccatatccggcatgactgccagcacgccgcgcttcgccagacgaccgtgaccaatttcacgacgcttcggagaaccgaccatgccggtttcgcctacggagtacggagggaagttgtagtggaacaggaaggtatcggtacgttcgcccatcagttcatcaagaacctgcgcgtcacgagcagtacccagcgttgcggtaaccagcgcctgcgtttcaccacgggtgaacagcgcagaaccgtgagtacgcggcagcacgccagtacgcacatccagaccacggatcatatctttttcacgaccgtcgatacgcggttcgcctgccagtacgcggctacgaacaacgtttttctcgatcgcgtgcagaatttcacccagttcgttttcgtccagggtttcgtcttcagcaagcagcgtcgcgatggtttcagatttgatgacatcaacctgcgcataacgctcttgtttgtcggtgatgcggtaagcatcgctcaggcgagcttcagccagtgcagcaacgcgcgcgtttagcgcttcgtttaccggctccggctgccagtcccaacgcggtttaccggcttctttcaccagttcattgatgttctgaataacaacctgctgttgttcatgaccgaacactactgcgcccagcatctggtcttcgctcagcagttgagcttcagattcaaccatcagtacagcggcttcagtaccggcaacaaccagatccagtttgctctctttcagctcgtcctgagtcgggttcagtacgtactggtcattgatgtaacctacgcgggcagcaccaatcgggccattgaacggaataccagacagagacagcgctgcggaagcaccaatcatcgcgacgatatccgggttaacttgcgggttaacagaaaccacggtggcgataacctgaacttcgttgacgaagccttccgggaacagcgggcgaatcgggcggtcaatcagacgcgcgatcagggtttcgccttcgcttgggcggccttcacgacggaagaagctacccgggatacgaccagcagcgtaggtacgctcctgatagttaacggtcagtgggaagaagtcctgacctggtttggcttttttctggccaacaacggtaacgaataccgcggtgtcatccatgctaaccataacagcggcagtagcctgacgagccatcacgccggtttccagagtcacggtgtgttggccgtactggaatttacgaacgatcggattaagcaatgtaatatcctttctctttcttagacagtaccttacggcactggtgttaatacccgatcttctgcgcatcctcgcgactaatgacaaccctaacccagctctatgtgggtaaagcctctcattagccgcgcgaacctctgcaacggaagatcattcatagcaacaatacattagtttccagtgaattgctgccgtcagcttgaaaaaaggggccactcaggcccccttttctgaaactcgcaagaattagcgacgcagacccaggcgctcgatgagctgggtgtaacgtgctacgtctttacgtttcaggtagtcgagcagtttacgacgctgagaaaccatgcgcagcagaccacgacggctgtggtgatcttttttgtgctctgcaaagtggccctgcaggtggttgatctgtgcagtcagcagtgctacctgaacttcggtagaaccggtgtcgtttgcgtcacgaccaaactcagaaacgattttagctgttgcttcagtacttagagacattttaaaactccaaagtatatagaatgaaaggacgccgatctctaattcagcgatcccagtgtacgttacgcaaagtgttaaacaatttacgcgacgttaagcggcagtattctactcgtagcgacctgttatcgcaagacggttaacattacgccgggtattcaaccaccaggcgacgaggcgcaacgcggccttcatcgtcaatttcgcccataccgataaatttgccgttctcaccttccgtgacgcgaaccagtccttccagtggcgcaccagatgtacgaaccgggttaccatttttgaagtaaacagaagacgttaacggaagattcaccaccggatagtccgaagctggactgtccattggcatcagtaatggatcaagtaactccgcggctggaatatcctgctgttcagcttgctcaacaagttcacgcaggtgctccagggtcaccatccgttcaaccggatatttacttaccgccagacggcgcaggtaaataacatgcgcgccacagccgagtttttcacccaggtcatcaatgatggtgcggatataagtgccttttgagcagtgaatttccagctccagctcattgccttcatggcgaataaacagcaattcataaacggtaatcggacgcgcttcacgcggaacttcaatgccctgacgcgcatattcgtacagttttttgccctgatatttcagtgctgaatacatcgaagggatctgttcgatatcgccacggaaagtatccagtgccgctgccagctgctctgcgctaaaggttaccggacgttcttcaacgatctgtccgtcggcatcagaagtatcggtacgctgtccaagacgcgcaatgacccgatagcgtttgtcggagtccagcagatactgggaaaacttcgtcgcttccccgaggcaaatcggcaacatgccggtcgccagcgggtccagcgcaccggtatgcccggcacggttggcgttatatatacgtttcactttttgcagcgcatcgttgctggacataccctgaggtttatccagcaacaaaacgccgttaatgtcgcgaccgcgacgacgaggacgactcattagtcctccttgctgtcgtccgggttaacacgacgttcttcgtcatgtttgaccacgctggtcaccaggtttgacatgcgcatcccttcaaccagagagttgtcgtagaagaaggtcagttccggcacgatacgcaggcgcatcgctttccccagcaggctgcggatgaaaccagaagcttcttgcaacgctttgatgcccgctttaaccgcgtcttcatctttgtcgttgaggaacgtcacatatactttggcatacgccaggtcgcgagacatttcgacaccggaaacggtggtcatcatgcccaggcgaggatctttaatttcacgctgcaggatgagagcgatctctttttgcatttcctgcgctacgcgctgcgggcgaccaaattctttcgccataataaattctcctgacaaaaaaggggctgttagcccctttttaaaattaatttcaggtggaagggctgttcacgttgacctgataagacgcgccagcgtcacatcaggcaatccatgccggatgcagcgtaaacgccttatcccgcatggaaccctaaaaaccttaagcaatggtacgttggatctcgatgatttcgaatacttcgatcacatcgccagtgcggacgtcgttgtagttcttaacgccgataccacattccataccgttacggacttcgttaacgtcatctttgaagcggcgcagggactccagctcgccttcgtagataaccacgttgtcacgcagaacgcggatcgggttgtgacgtttaaccacaccttcggtaaccatacagcctgcgatggcaccaaatttcggcgatttgaacacgtcacgaacttccgccagaccgataatctgctgtttcagttccggagacagcataccgctcatcgccgctttcacttcgtcaatcaggttatagatgacggagtagtaacgcagatccaggctttccgcttcaatcactttacgtgcagaggcatcagcacgtacgttaaagccaaccaggatggcgttggacgccgcagccagggtggcgtcggtttcggtgataccacctacgccagaaccgatgatcttcactttaacttcgtcagtagacagtttcagcaaggagtcggagatcgcttcgacagaaccctgtacgtctgccttcaggacgatattcacttcgtgaacttcgccttcggtcatgttggcgaacatgttctcgagtttagatttctgctgacgcgccagtttaacttcgcggaatttaccctgacgatagagtgcaacttcacgcgctttcttctcgtcacgtacaacggtaacttcatcacccgcagccggtacgccggacaggccgaggatttccaccggaatggacggacccgcttccagcacttcctgacccagttcgttacgcatcgcacgaacacgaccgtattcgaagccacacagaacgatatcgcccttgtgcagagtaccttcacgtaccagaacggtagcaaccggaccacgacctttatcgaggaaggattcgataaccgcaccgctcgccatacctttacgtaccgctttcagctccagaacttccgcctgcagcaggatagcgtccagcagttcatcgataccggtacccgctttcgcagatacgtgtacgaactggctttcaccgccccactcttccggcaggatgccgtactgggagagttcgttcttaacgcgatccggatcagcttctggtttatcgatcttgttcactgcaaccaccaccggtacctgcgccgctttcgcgtgctggattgcttcgatggtctgcggcatcacaccgtcgtcggcagcaacaaccaggactacgatgtccgttgcctgcgcaccacgagcacgcattgaagtaaacgcggcgtgccccggggtgtccaggaaggtgatcatgccgttttcagtttcaacgtggtatgcaccaatgtgctgggtaatgccgcccgcttcgccagaggccactttcgttgaacgaatgtagtccagcagagaggttttaccgtggtcaacgtgacccatgatggtcacaaccggcgcgcgcggttcagccgcagcacccgtgtcacggtcgctcattaccgcctcttccagctcgttttcacgacgcaggataactttatggcccatctcttcagcaaccagctgtgcggtttcctgatcgataacctggttgatggttgccattgcgcccagtttcatcatcgctttgatgacctgagagcctttaaccgccatcttgttcgccagttcgccaacggtgatagtttcgccgatcacaacgtcacggttaacggcctgagcaggcttctggaagccttgctgcagcgaagaacctttacgttttccgcctttaccgccacgtactgctgcgcgtgcttcttcacgatcagcttttgattcagcgtgtttgttgcctttcttcggacgcgctgctttcgcgttacgaccacggccacggccgccttcgacttcacgatcgctttcgtcttctgcctggcgagcatgttgagaagtagtgacgtgataatcgctggaatcttcagtcggttccgcgttatcagtccatttgttttcttccgccatacgacgtgcttcttcagcaacgcgacgtgcttcttcttcgagtttacgacgcgcttcttcttcagctttacgcttgagctctgcagcttcctgctcacggcgggctttttcagcctgggcgtttttagtcatatcgtcttgttgattgctcactttgtctttttccgcagcttcacgtttcgcttgttcagcagcttcacgcttagcttgttctgcggcctcacgttcagctttttgttgcgcctcgcgtttagccgattcttctgcctcacgacgggcttgctcttccgcttcacgctgcgcttgctcttccgctgcaaggcgttcagcctcttgcggatcgcgtttcacaaaggtgcgtttcttgcggacttcgatttgtaccgatttgctttttccaccggtaccaggaatgttaagggtgctgcgtgttttacgttgcagcgtcaatttgtccgggcctgaatttttctgattcaggtggtcaatcaaagtctgtttctcttgtgcagacacagagtcgtcagcagacttccggatacctgcatcagcaaattgctgtaccaggcgttccacggaggtctgtcgctctgcggccagcgttttaatcgttacatctgtcatgctgttccttcctgctacagtttattacgcttcgtcaccgaaccagcaaatattacgggcagccataatcagtgctccggctttttcgtcggtcaacccttcgatatcagccagatcatcaatgccctgttcggcgagatcttccagcgtacaaacgccacgggcggccagtttgaatgccaaatcacgatctaccccttcaaggttcagcagatcgtcagccggtttgttatcaccgaggctttcttcctgggcctgtgcaatggtggccagtgcatttttagcacgctcgcgcagtgcttcaacggtcggctcatcaaggccttcgatttccaacagctctttcatcggcacataggccagttcttccagcgtcgagaagccttcttctaccagaacagtcgcgaagtcttcgtcgatgtcgagatatttggtgaaggtgtcgatcgctgcgtgcgcttccgcctgatgcttagcctgcaggtcgtcaacggtcatcacgttgagttcccaaccgctcagctgcgaagccagacgcacgttctgaccgttacggccaatcgcctgcgccaggttaccggcttcaacggcgatatccatggtgtgtttatcttcatccaccacgatagaagcaacgtctgccggtgccattgcgttaatcacgaactgcgccgggttatcatcccacaggacgatatcgatacgctcgccacccagttcagtagacaccgcctgaacacgcgcgccacgcatacctacgcaagcacctaccggatcgatacgtttatcgttggttttcaccgcgattttcgcacgagaacccggatcgcgagccgctgctttaatttcaatcacttcttcgccgatttctggcacttcaatacggaacagttcgatcagcatttccggcttggaacgagtgacgaacagttgcgcgccacgcgcttccgggcgaacggaatagagcacgccacgaacgcggtcgccagggcggaagttttcacgcggcagcatatcttcgcgcaggatcacggcttcagcgttgttgcccagatccagagagatgttgtcgcggtttacttttttcaccacgccggtgatgatttcaccttcgtgttcacggaactgatcaaccaccatcgcacgttcggcttcacgcactttctgcacgataacctgttttgccgtctgggtagtgatacggtcaaaggtaacagactcaatctgatcttcaacgtaatcgcccaggttcaggctttcatcttcataacgtgcggcttcaagggtgatttccttggtcggctgggtgacttcatcaacaactaaccagcgacggaaagtgtcaaaatcaccgcttttgcgatcgatctgtacgcggacgtcgatctcttgttcatattttttctttgttgctgtcgccagcgcgctttccaatgcttcgaaaatcttctcgcgaggtagcgccttttcattggatacggcttcaactacagccaaaatttctttgttcatcgcgggcttttcacctcatccagactattaaaagtggggaaccaggttcgccttctggatattactcagcgcgaacacttcatctttaccttcgacggtaactgtgatcatttcaccgtctaccgctttgataacgccctgccatttacgacggttttgtaccgccatacggagaaccagagtcacctcttctccgacaaaacgggcgtagtgttcagccgtgaacagtgggcgatcgagacccggtgaggagacttccaggttataagcaacggtgatgggatcttcaacatccagcacagcacttacctggtggctcacatcagcacaatcatcaacattgatgccatcttcactatcaatatagatgcgcagtgtggatgtgcgaccgcgaataaattcgatgccaaccagttcaaaacccagggcctcaactggcgcagtaatcatctctgttaatttttgctctaatgtggacaagcccacccccaagacataaaaaaagggcctaaagcccagttattctgtagtcagataacaaaaaaccccgataaatcggggctttatataactgaaccctataaccgcaactgcggtctggagcactttccagaaggattttttcaaatcccactacgaaggccgaagtcttcacagtatatttgaaaaaggactctaagggaaagtggttgcgggggccggatttgaaccgacgaccttcgggttatgagcccgacgagctaccaggctgctccaccccgcgcctgaaacgtggcaaattctactcgttttgggtaaaaaatgcaaatactgctgggatttggtgtaccgagacgggacgtaaaatctgcaggcattatagtgatccacgccacattttgtcaacgtttattgctaatcatgtgaatgaatatccagttcactttcatttgttgaatacttttgccttctcctgctctcccttaagcgcattattttacaaaaaacacactaaactcttcctgtctccgataaaagatgattaaatgaaaactcatttattttgcataaaaattcagtgagagcggaaatccaggctcatcatcagttaattaagcagggtgttattttatgacgacgattctcaagcatctcccggtaggtcaacgtattggtatcgctttttctggcggtctggacaccagtgccgcactgctgtggatgcgacaaaagggagcggttccttatgcatatactgcaaacctgggccagccagacgaagaggattatgatgcgatccctcgtcgtgccatggaatacggcgcggagaacgcacgtctgatcgactgccgcaaacaactggtggccgaaggtattgccgctattcagtgtggcgcatttcataacaccaccggcggcctgacctatttcaacacgacgccgctgggccgcgccgtgactggtaccatgctggttgctgcgatgaaagaagatggcgtgaatatctggggtgacggtagcacctacaaaggaaacgatatcgaacgtttctatcgttatggtctgctgaccaatgctgaactgcagatttacaaaccgtggcttgatactgactttattgatgaactgggcggccgtcatgagatgtctgaatttatgattgcctgcggtttcgactacaaaatgtctgtcgaaaaagcctactccacagactccaacatgcttggtgcaacgcatgaagcgaaggatctggaatacctcaactccagcgtcaaaatcgtcaacccgattatgggcgtgaaattctgggatgagagcgtgaagatcccggcagaagaagtcacagtacgctttgaacaaggtcatccggtggcgctgaacggtaaaacctttagcgacgacgtagaaatgatgctggaagctaaccgcatcggcggtcgtcacggcctgggcatgagcgaccagattgaaaaccgtatcatcgaagcgaaaagccgtggtatttacgaagctccggggatggcactgctgcacattgcgtatgaacgcctgttgaccggtattcacaacgaagacaccattgagcagtatcacgcgcatggtcgtcagttgggccgtctgctgtaccaggggcgttggtttgactcccaggcgctgatgctgcgtgactctctgcaacgctgggttgccagccagatcactggtgaagttaccctggagctgcgccgtgggaacgattattcaatcctgaataccgtctcagagaacctgacctacaagccagagcgtctgacgatggaaaaaggcgactcggtgttctcgccagatgatcgtattggtcaattgaccatgcgtaacctggatatcactgatacccgcgagaaacttttcggttatgccaaaactggcctgctttcctcctctgccgcttcaggcgtgccgcaggtggagaatctggaaaacaaaggccagtaattcgacatcaaccctgcccttcaggggtggggttaccttgcttatcctctgtaaactcctttctgagcatcacataatcgaaaacatcatggtttgcatccacaacccgtgagtctcctttatagtgtgcaatcacttcctcaagcgtttgcggctgttccggctttgttacccccatccacgcattaataaggtaattattgtaagctgtcgaaaagatgttgttttccgttgtgcgatccacgccatccccaagaacggggctataccagataaacatcgggacatgatatgcctgctggctagcctccctgcctccatgaaaatagacgttcttcttcgtagggtcacgttccaggccgtggtcggcaaaatacatgaccgaggcgcggcgatcttttaataattcaaaaacctgacctagcaaactatctgtgtaatgaatggagttgtcatagcaggcatcctgatcgtcctgcggttgaaacacggcgctggattgcggataggcgctacaagccggttcatggcttccatttaaatgaagaacaatcagtttcttttgctgcgtattttgctgtaatgcttgcgataaatgcggcaacaacaattcatcaaatcctctgacataaactgtttccatggcgcgcatggcgatactggtaactgctgtaccattctgccgaaaagcggattgcgagcttagccagaaagtctgaaatcctgcttgattagccatattaataatgttgtcggggtaattatgaatgtcatgactcaaaacagaatcagcagttaaagaaaggggaaccgacagcgcagtgtaaggtgcgccgcttattgcttgattaaacagtttgatctgttttctttgtgcttcaacttgcggtgtcgtagagcgtgtatatccatacaaagacatattgtcgacacgtacagactcccccacaatcaacacgtaggtatcaatacctgtatccctgactgataattgaaaatacggcaccgtgtttgcaattgagagtaatctttgatgctctttcgctgctaaagcaaaatagttgagattgaaaaacggcgtataggtagcaaatcgcgacgctagtatatatggactgaacgcttttttattttttgcatctttataagcaaattgacaagcggaaaataaactgcccgaaatgacaatcagcaataatattcctgtcactttttttgtcggcaaggaaacatcatattttattattactgccaaaaaaagaagggataaaaaagcaaaggcacatagataagggatatacatccccagcattttgacaacttcatccggatcactctggagcacactaatcgcaaatccatcattgaaagttgtaccaaaggtacaccatgaatagaggctaatactcatgtctgccgcagtcagtaacacaaatggtgcggcaacaagcaggcgaagcggaagggatgatatacgttttacaaccaggatggtcagaacgaagaacagcaagcgctgaaccatatgcgctccggaagaagcgactaagttcgtaataccaaaaacaataacacaaagatacaacaaccaatgagatttaaaagttctagcaaatttgttgaatactgtcatccagaaatccaagttcacaaccaatataaacaattatcaacaatgtttaattttatatcagacatgtttttcaactctgatccatatcagaacgaaacactgttagttttttctttttaaatgatgcggccattgcgttctcagtaattaaataacattatcaatgcgtctctaaacattacgcagaacgtagccatcagtcgttatactgacaggagcaggatggtttatcgagaagtaaacatatccgtattcgtaccggaactggagttgacacaataaagtgccaattatgtcagtagaagggaaaaatttataactaaggcgtaccggcaccatcgtttcaaggtaccagctacgagtaaagcaactggacgagatacagatacctgacaaccattcctcagaccaggaccaaaacgaaaaaagacgcttttcagcgtctcttttctggaatttggtaccgaggacgggacttgaacccgtaagccctattgggcactaccacctcaaggtagcgtgtctaccaattccaccacctcggcacggatattactttttagttcgggatatcgctggtcggcttagccggagcagctggctgagtttgttcggttttcgccggtgcactcagattttcccattcgctacctttattggttttgttgctattgatgttacccagcaccagactgatgataaagaataacgttgccagcagcgccgtcatgcgggtcatgaagttaccagaaccacttgaaccaaacagcgtagcggaagcgcctgctccgaaggaggcgcccatatcagcgcctttaccttgctgcagcatgatcagaccaacaaggccaattgccacaataaggaaaactactaaaagagcttcatacataatcaacctgttccttgcggagttgccgcgtaccaatgcttcaaccaataaagcgggagtttttaatctttcccactgaagcgggtgtgaatactaaccaaagcgaatgaccttcgcaagggcaattttatcgcattgtatcaactgcggaaaaaaacagcaaaaccgatgtgttcgctgagaaaaaaggcgacaatcgccgcctttttagccagttatctaacgctttaaacggcttttactgcatcggcgatgcggtgtgcaaattcagtcacctgcgcttcgtcttcgccttccaccatcacgcgaattaacggttcggtgccggatttacgcagcaacacgcgtccacggttgcccagcgcagcttcaacctctgcggtcacggctttaactgactcatgctcaagtggatcgccgctacctgcggtgtaacgtacgttaaccagaatctgcgggaacattttcatgccgctgcaaaggtcgtgcaggctcatatggttacgtgccatcgccgccagcacctgcaagccagcaacgatgccgtcaccggtagtagttttatccagcaggatcacatgaccggaattctctgcaccgatacgccagcctttctcctgcattttttccagtacgtagcggtcacccactttcgcgcgcgcaaatggaattcctaactgtttcagcgccagttcaagccccatgttgctcatcaatgtacccacagcgccaccacgcagctggccctgacgaagaccttcacgcgcgatgatatacatgatctgatcgccatcgactttattgccttcatggtcaaccataatcacgcgatcgccatcgccgtcgaaggcaataccgagatccgctttttcagccagcacacgagcctggagcgcgcgaacgtcggtagcccccacttcggcattgatgtttacaccgtttggctcacaaccgatagcgataacgttcgcccccagttcgcgcagcacgttcggcgcgatgtgataagtcgcaccgtttgcacaatccaccacaatcttcagttcactgaggctaagttcgttcgggaacgtggctttgcaaaactcgatatagcgacccgcggcatcaacgatacggctggctttacccagttctgccgaatcaacgcagctgatctccttttccatttccgcttcgatggcctcttctaccgcatccggcagtttggtgccgtcgatagagaagaatttaatgccattatcgtagaacgggttatgcgatgcagatatcacaattccggcctctgcgcggaaggtacgcgtcagataagccacggccggtgttggcatcgggccagtgaagagtgcggaaaggcccgctgccgccagacccgcttccagtgctgactccagcatatagccagaaatacgcgtgtctttaccaataataatcttacgggagccgtggcgcgccagcactttacccgcggcccaacccagcttaagcacaaaatcaggtgtgatcggcgcatcccctacacgaccacgaatcccatcggtaccgaaatatttacgattactcatagcgtttgttttcctttgcagacagagtggcttccaccacccgcatcgcttctacggtttctttgacgtcatgaacacgaatgatgtgcgcgccttgcattgcggcaatgaccgcacaggccagactaccgctcaggcgctcggacggccccacgttcagcagctgcccaatcatcgattttcgtgacatacccaccaacagcggcaggttgaaatggtgaaattcagccaggcgcgccagtaatgaatagttatgggagagatttttaccgaaaccgaatccggggtcgagcaacaatttctcttttgcgatacccgcctgctcgcaacgtgctatttgctcaataaagtagcgattcacttctgcaaagacatcgtcatacttcggagcttcctgcatggtttttggatttccctgcatatgcatcagacaaaccggtaaaccggtttctgcagccgcctccagagcgccaggttcggaaagggagcggatatcattaataatgtgagcgccaactttcgctgactcacggatgacttctggtttggatgtatcgactgagatccagacttcgaagcgttgagcaattgcctcaaccacaggaataacacgttgcaactcttcttcaacgctaacttccgccgcccctgggcgcgtggactcgccaccaacgtcaatgatcgtcgcgccagcgttgatcatcagattcgcatgtttcaccgcatctatcagcgagttatgcgtgccaccatccgaaaaggaatcaggcgtgacgttgaggatccccattacgtgaggatggctaaggtccagtgaagtaccctgggcaaagagtttcatgatgttatccctggtatgaattgataagaaaaaaccccggagcacgccccggggttttcggtacaaatacagtcatctgatgcgggaacttacttgtcgcctaactgctctgacatggtgttacccgggttcggcgtacgcggttcatcaaccggacgaggagcctttggactaccattgtcgccagaattgttagaagcgcctggttcttcccagcccgctggcggacgtacatcgcgacgtgccatcaggtcatcaatctgcggtgcgtcgatagtctcatatttcatgagagcatctttcatcgcatgcagaatatccatattgtcggtcagaagctgacgcgcacgattatagttacgctcaatcagtgctttcacttcctggtcgatgatacgtgcagtttcatcggacatatgtttcgctttcgctacgctacggccgaggaacacttcaccttcttcttccgcgtacagcagtggacccaatttctcagagaagccccactgagtcaccatgttacgtgccaggttggtcgcaactttaatatcgttggacgcaccggtagatacatgttccggcccgtagatgatctcttctgccagacgaccaccgtacagcgtagaaatctggctttccagtttctgacggctggcgctgattgcgtcgccctcaggcaagaagaaagtcacacccagcgcacgaccgcgtgggataatcgtcactttgtgcaccggatcgtgttccggcaccaggcgaccgataatcgcatgacccgcttcgtggtaagccgtcgattctttctgcgcttccgtcatcaccatggagcgacgttccgcacccatcatgattttgtctttcgctttctcgaactcaaccatcgacacaacgcgtttgttgccacgagcagcgaacagtgccgcttcgttcaccaggttcgccaggtcagcaccggagaaaccaggagtaccacgggcaatgattgccgcgtcgatatcgggtgccaatggtacgcgacgcatgtgaactttcaggatctgctcacgaccgcgaacatctggcaagccgaccacaacctgacggtcgaaacggccaggacgcagcagggccgggtcgagaacgtccggacggttagtcgcggcgataacgatgataccttcgttaccttcgaagccatccatctcaaccagcatctggttcagagtctgttcacgttcatcgtgaccaccgcccagaccagcgccacgctggcggcctacggcgtcgatttcatcgataaagatgatgcacggtgccgctttcttcgcctgttcgaacatgtcacgaacacgggatgcacccacaccgacgaacatttctacgaagtcagaaccggagatagtaaagaacggaactttcgcttcgcctgcaatcgctttcgccagcagcgttttaccggtacccggaggaccgaccatcaagacgcctttcgggatcttaccgccgagtttctggaagcggctcggctcgcgcagatactcaaccagttcagcaacttcttcttttgcttcgtcgcagcccgcaacgtcagcaaaggtcgttttgatctgatcttccgtcagcatgcgcgctttgctcttaccaaacgacatggcacctttgccaccgccgccctgcatttgacgcatgaagaagatccagacaccaatcagcaacagcatcgggaaccaggagatgaagatagaagccagcaggcttggttcttcaggcggttcaccgacaaccttgacgttcttggtcaacaggttatccagtaatttcggatcctgaaccggaatgtaagtggtataacggttactatctttcttggtaacgttgatttcacgtccgttgatacgcgcttcacgaacctggtcgttattgacctcttgtaggaaggtagagtaatccaccttacggccattagactcgctgggcccaaagctctggaatactgacatcagcacaacggcaatgaccagccagagtattaggtttttcgccatgtcactcaagggattaacctcttattacaactgtgttaaaaacagcgtcaggatactctatatccagcatctttcaaactttcgtctgaaatctcccggttagggtttacgcccggtcgctacaatatacacttcccgcgaacgtgcacgagaagagtccggcttacgaactttgaccttcgtaaacagggagcgaatttcccttagatactcatcgaaaccttcgccctggaacaccttcactacaaaactgccacctggcgctaatacatcacgacacatttctagcgccagttccaccagatacatggcacgggggatatccaccgccggtgttccgctcatgtttggtgccatatcggacatgacaacctggactttgctgtcgccaacgcgctccagcagtgctttcatcaccagttcatcacgaaaatcgccctgaagaaagtccacaccaacgataggatccataggtaaaagatcgcaagcgacgatgcggcctttgccgccaatttgggtgaccacatattgtgaccaaccacccggagcagcaccaaggtcgacaaccgtcattcccggtttaaagagtttgtcactttgctgtatttcatcaagtttaaaccaggcacgggaacgtaacccctttttctgtgcctgttgaacatatttatcgctaaagtgttcctgaagccagcggctggagctggcagaacgcttcttacctgtcatttaactttcccatggggataactcatcgtaaccaattgcgtaaatttttacgcgcctatttggtgatatatgggagatggcggtagaatgacccgttttcaatcccaacgtaagcaaaaaatacgatgaatctgagtactaaacaaaaacagcacctgaaaggtctggcacatccgctcaagccagttgttctgcttggcagtaatggtttgaccgaaggggtgctggccgagattgaacaagcgttagagcaccatgaactcatcaaggtgaaaatcgccaccgaagatcgcgaaactaaaaccttgatcgtggaagctatcgtgcgcgaaaccggcgcctgtaatgtacaggtcatcggtaaaacgctggtgctttatcgcccaactaaagaacgtaaaatctcgctgccacgctaagattatcctaaagttacacacatttgctgtgtaaaacgaggggttttccgcaggcaggagagcaaaatgccacgctctgttcgttgataaaaggccgcatagcggcctttttcctttctttacaatacatcaacatcttgagtattgggtaattcttacaggtattccaccttaattacttcaaattctacttcgccgcccggcgttttgatgaccacaacatcatcttcttctttgccgatcaggccacgagcaataggcgagtttacagaaatcaggttttgtttaaagtcagcttcgtcatcgccaacgatgcgataagtctgttcttcgtcagaatccagattcagcaccgttacggtagcaccaaaaataacgcgcccattgttgggcattttggtgacatcaatcacctgcgcgttcgacagcttggcttcgatgtctttaatacggccttcgcagaaaccctgctgttcacgagctgcgtggtattcggcgttttctttcaggtcgccatgctcacgcgcttccgcgatagcagcaatgatttcaggacggcgcacagatttcagaaaatccagctcttcgcgtaatttttcagcgccgcgtaaggtcatcggaatagcttgcatttgttatacctcttgaatattcctgatagggcaagtcttcacccaccccggctgttcggcctgcccggcataactccttaccgggaccagaagcaaaaaaataccgacccgggtacaagtcccaggtcagctacaattcacattttgatagtcattttaccctgaagttcccgaagggtcatcgtttactttatagggcgttgcgccgtagtatgacggctcgattccaggttgttagcgcgagattatgcgattttccagatttatcatcggattgaccagctgtatagcgttcagtgttcaggccgcaaatgttgatgagtacattactcaactccccgctggtgccaaccttgccctgatggtgcaaaaagtcggcgcgtcggcccccgctattgattaccacagtcagcagatggcgctgcctgccagtacccagaaagtgattactgcgctggcggcgttgattcaactcggccccgattttcgttttaccacgacgcttgaaaccaaaggcaatgtggaaaacggcgtacttaagggtgacttagtggcgcgatttggtgccgatccgacgttaaaacgtcaggatattcgcaatatggtcgcgactttgaaaaaatctggcgtcaaccaaatcgatggcaatgtgttgatagatacctccattttcgccagccacgataaagcccccggctggccatggaatgacatgacacaatgctttagcgctccgcctgccgccgccatagttgaccgcaactgtttctccgtctcgctctacagtgccccaaagcctggtgatatggcttttatacgcgtggcatcttattaccccgttacgatgttcagccaggtacgcaccctcccccgtggttctgccgaagcgcaatactgcgaactggatgtggtgccaggcgacctgaaccgctttacgctgacgggatgcctgccacaacgttctgagccgctcccgttggcttttgccgtgcaggatggagccagctatgccggtgcaattctgaaagatgagttaaaacaggcgggtatcacctggagcggaacactgctgcgccagactcaggttaacgaacctggaacggtagttgccagtaaacagtcggccccgctgcacgatctgcttaagattatgctgaaaaagtcggacaacatgatcgccgatacggttttccgcatgataggccatgcgcgcttcaatgtgcctggaacatggcgggccgggtcggacgccgtgcgtcagatcctgcgccagcaagccggtgtcgatattggaaacaccattattgccgatggttcagggctttcgcggcataacctgattgctcccgccaccatgatgcaggtgctgcaatacattgcccaacacgacaatgaacttaactttatctccatgctgccgctggcgggctatgacggctctttgcagtaccgtgcaggtctgcatcaggcgggcgtggatggaaaagtctcagcgaaaaccggttcgttgcagggggtatataacctggcgggattcattaccacagcgagcgggcaacgaatggcatttgtgcaatatctttctggctatgcagtagaacctgcggatcagcgtaatcgccgtattccgttagtgcgttttgaaagccgtttgtataaagatatttatcagaacaattagtcaaaaagaaaccccggcacatggccggggcttcagattattgacaaagtgcgctttgtttatgccggatgcggcgtaaacgccttatccggcctacaaaatcgtgcaaattcaacatattgcaattctcttgtaggcctgataagcgtagcgcatcaggctgatttggcgtttatcatcagtgattaacgcttgtaaatgaactcaacgccttcttcgtcgtcttcgtcccagtcgtcatcccagtcttcatcatcctcttcagcaatctcttcaagctgctggcgatgataatcatcccacatgaattcgactttctctggctgtttcgcttcttcagcctgcacgaccgggttttcaatgataaaggtcatcacatcccagcagagatctttcacgcccagtccactcgccgcagagatcagataatatttatcttcccagcccagcgcctcagcgatcgctttcgctttctcttcggcttctaccttatccagcagatcgatcttgttgaacactaaccaacgcggtttcgtcgccagatcctggctgtatttttccagctcgctgataataatacgcgcgttttcaaccggatcggtgccgtcaatcggatcgatatcgatgaggtgcaacaggacgcggcaacgttccaggtgcttcaggaagcgaatgcccagacctgcgccttccgcagcgccttcaatcagtcctggaatatcggcaacaacgaagctcttttcgttgtccattcgtaccacacccagacttggcaccagagtggtaaacggataatccgccactttcggtttagccgccgataccgcacgaataaaggtcgatttacccgcgtttggcatccccaacataccgacgtcagccagcagcatcagctccagcagcagctcgcgcttatcgcccggcgtgccgttggttttctgccgcggtgtacggttaacggacgatttgaaacgggtattgcccagaccgtgccagccgcccttagcaaccagcagacgctgaccgtgtttggtcatatcgcccatggtttcaccagtaccctggtcgattacacgcgtacctaccggcactttaatcgtcacgtctttaccgcgcttaccggtacagtcgcggcttgcgccattctgaccgcgctctgcacggaaagatttttcaaaacgataatcgataagcgtgttcaggttctcgtcggcttccatccatacgtcaccaccatcaccgccgtcgccgccatccgggccgcctttcggaatatacttttcgcggcggaagctcacgcaaccattaccgccatcacctgcaacgaccagaatcgatgcttcatcaacaaacttcattttattctccgtaaatcattcgcctgcgcggggttgcgataccaccgttgtatgcttacgtaatccgccccaaatacgatgaccaatggcggaatacatcgcgcccgcaaccacgacaaacgcaccgagataacctaaaaggtttaacatcggtctggcgaagaaatcgggccaggccagtgataaaagatctgaaaaaaacagcgtaaacagtggggtgagcgtgatgatcgcgctcacctgcgctgcctgccagcgagccatcgcttccgccagggcgccatatcctaccaaggtattcagtccgcaaaaaattaaacatgcgagctgccagtggctaagctgcgctatcactccaggctttgccagagggaagagcgcaattgtacataaagtgtacagcaaaaacaggatctgcggtgaggccagccgacgcaataaaaccttttgcgccacgccataactcacccaaaccgtcgccgcaccgaccccaaagataactccccaggtgtaatcggtgagctttgtaaatatctcgaccagactggtgttaaaaaacatcaccaggccgctcaggagcatcaatgcccctacaacctgagtgctgcgcattttctctttgaggataaatacgctggcaaccatcatgccaactggcgagagttgcccaatcacctgcgaagcggtcggactcaggtattgcaaggatgagctgaacaggatgaagttcccaaacagcccggcggtcgccactgccaacaaaatcaaccagcgtggcttacgaaacacgcgtaatggcggcaacctcttcttcaccgcaagaatggcacccaggccaatactcgccatcaagaaacggtaaaacacgattgtcggaggttccatcacctccagcacctgcttcattgcgattggcaacgccccccagcaaattgctgtggtgagcgccaaaagaatgccaatgcctgcctgctgcttcataccgtattccctgcaaagcgcatttgcggattaacgtcgcaccatgcgcatttttaccggttatcgaatgtaaaaagccccgcaacgtgttgcggggctttcatccgttaccgggacgcgaaaaacttattcagcttcgatgctgataaatttacggtttttcgggcctttaacttcgaatttcactttaccgtctgctttagcaaacagagtgtggtcacgaccgcaacctacgttagcgccagcgtggaatttggtaccacgttgacgaacgatgatgctacccgccagaacggattcgccaccgaaacgcttaacgcccaggcgtttagcttctgaatcgcgaccgttacgtgtggagccgccagcctttttatgtgccatttgaaatctctcctcaggtcttaggcgctgatgccagtaattttcacatcagtgaaccactgacgatggccctgctgcttacgatagtgtttacgacgacgaaacttaacgattttaactttctcgccacgaccgtgagcaacaacttcagctttgattacgccgccatcaacgaaaggaacgccgattttgacttcttcaccgtttgcgatcatcagcacttcagcgaactcaacagtttcgccagttgcgatgtccagcttttccaggcgaacggtctgaccttcgcttactcggtgttgtttaccaccactttggaaaaccgcgtacatataaaactccgcttccgcgcacaccttttcaatgattcagagtgcgctataaatattcacaatagggcgcgaatattacgcaaaacgcacgcctttgacaagtgctacagtcaatacacgaagaaaaaaaacacaacttgtacggtaacgtttatctgtgccattttttcagtacaatcaccctatattcctaaccataaaccctaagttgcctttgttcacagtaaggtaatcggggcgaaaagcccggcttttgcgatgaatttagaaaaaatcaatgagttaaccgcgcaagatatggcgggtgttaatgcggcaatccttgagcagcttaattccgacgtccaactgatcaatcagttaggctattacatcgtcagcggcggcggtaaacgtattcgtccgatgattgctgtactggctgcacgagctgttggctatgagggaaatgcgcatgtcaccattgctgccctgatcgagtttatccacacggcgactctgctacacgacgacgttgtggatgaatcagatatgcgcaggggtaaagctaccgccaacgccgcatttggcaatgccgccagcgtgctggtaggcgattttatttatacccgcgctttccagatgatgaccagcctcggttcgctcaaagtgctggaagtcatgtcagaagccgtaaacgtcatcgcagaaggtgaagttctgcaactgatgaacgttaacgatccggacatcactgaagaaaactacatgcgcgttatctatagcaaaaccgcgcgtctgtttgaggctgccgcgcagtgttccgggattctggctggctgtacgccggaggaggagaaaggcctgcaggattatgggcgctatctcggcactgctttccagttgatcgacgatttactcgattacaatgccgatggcgaacagttaggtaaaaatgtcggcgacgatctgaacgaaggtaaaccgacgctgccgctgctgcatgcgatgcatcatggcacaccagaacaggcacagatgatccgtaccgccatcgaacagggtaacggtcgccatcttctggaaccggttctggaagcaatgaacgcttgtggatctcttgaatggacgcgtcagcgtgccgaggaagaagcagacaaagccatcgcagcgttacaggtgctcccggacaccccttggcgagaagcactcatcggcctcgcgcacatcgctgttcaacgcgatcgttaatcccctcccctcatcccgcgcagcgcgcgggatggttccagtaagttccataaaaacacttattcagctctataacacctgaaaaatagggatgtgcatctttatatattctgaatattcacactctttacaggaactttttagagcaataggccatcaggagtatagtgatgctcgacagaagaagtgttctgaatgaaagcgactaacttaaggagtgaggaaaaatggaaagtaatttcattgactggcatcccgctgacatcattgcgggtttgcgcaagaagggaacgtcaatggcggcggaatctcgcagaaatggtttgagttcctcaacgctggcgaatgcattatcgcgcccatggccgaaaggagagatgattattgcgaaagccctgggaactgacccctgggttatctggccatcacgctaccatgatccgcagacccatgagtttatcgacagaacgcagttgatgcgtagctacactaaaccgaaaaaatgagtggtctggcggtagccccgcgaacggggctgccagctctcagacgattattcgcctttcacacgctcaatatttgcacctaaagcgcgcagtttgtcttcaatgcgttcgtagccacgatcgatgtgataaatacgatcaaccaccgtcgtcccttccgcaatacagccagccagcaccaggcttgctgatgcacgcagatcggttgccataacctgtgcgccagaaagtttttcaacaccgtgacaaataacggtattgctttcgatttcggcgtgcgcgcccatacggctcagctctggcacatgcataaagcggttttcaaagaccgtttcggtgataaacccggacccttctgccaccaggttcaacagcgtgaactgggcctgcatatcggtcgggaatgccggatgcggcgcggtacgtacgttaacagccttcggacgtttgccatgcatatccaggctaatccagtcttcgccgacttcgatgtccgctccagcgtcacgcagtttcgccagcacggcgtcgagagtatctggctgcgcgttacggcagataattttgccgcgagaaatcgccgccgccaccaggaaagtaccggtttcgatacgatccggcagaacgcgatagacaccgccgcctaaacgttccacaccttcgatgacgatacgatcggtgccctgaccgctaattttcgcacccagcgtaatcaggaagttcgcggtatcgacgatttccggttcacgcgctgcgttttcaataatcgtggtgccttccgccagggttgcagcacacatgatggtcaccgttgcgccaacgctgactttatccatcacgatatgtgcacctttcaaacgaccatcgacggaagctttaacgtaaccttcttccagtttgatggtcgcgcctaattgttcgaggccagaaatgtgtagatcaaccggacgcgcaccgatcgtacaaccgccaggtagtgaaacttgcccctgaccaaagcgcgctaccagcggccccagcgcccagatagaagcacgcatggttttaaccagatcgtaaggtgcgcagaatacattaacgtcgcgggcatcaatatgcacagaaccattacgttctactttcgcacccagctggcttagcagcttcattgatgtatcgacgtctttcagtttcgggacgttctggatctctaccggttcttccgccagtagtgcggcaaaaaggataggcagagcagcatttttagcgccggaaattgtgacttcgccctggagcttcgttggcccctgaacacgaaatttatccatttagtttgttctcagttaacaattcatatccgctaccggcgaatcgcccatagctcaaaagccgttcagtttgcgatcgcgcgcccactccgcaggggtatacgctttgatcgacacagcatgaatgcggttatccgcaatatattccatcagcggaccatagaccgtctgctgttttttaacccgactcatgccgtcaaacaactcacccacggcaataacctgaaagtggctgccatcgccggaaacgtggacttcctggagggagagagcgttcatcaacacgctctgaatttcattattttccatgggatcttcaatcatcagttaataaaccagcgaaacatcttagagcaaagttgcgctggcataaataagcaaaaagcctcgctgataaatcagacaaggctcgacttgcaggcaggtttgccggacaggcggttaacgccatatccggcctgaaaaaatttaacgaggcagaacatcagcaggcaaattatacaatttcgccagggtatacactttgtcgtttaccccctgaagcgtcacattgttgccctgctttttcgccagatcgataagatggagcagcagtgccagtccccccgtatccacgcgggagacacggctaagatcgatgcaggtaatccccttcaccgcttcctcacgcatttcccaaagcggtagcaaaacgtcctgatccagctctccggataacgccagcgtgtcacccgtctgcatccagctcagtgactcgctcattattttttctcttccagagtgattttctgttgagaaatcgatttcagttgcgcagtcaggccgtcgatacctttggtacgcagcagcgttccccactcgttttgtttggtggtgatcatactgacgccttcagcaatcatgtcgtaagcctgccaattgcccgtctgggagtttttacgccactggaagtccagacgcaccggcggacggccattcgggtcaataatggtaacgcgaataggcacaatggttttatcgcccagcggctgttctggcgcaatctgataggtttgaccgtgatacatcgccagcgcctgaccgtaagcctgcttcaggtactcacggaaagcggcaaagtaggcttcacgttgagcaggggtcgcactcttgtaatactggcccagcaccagcgcaccggcgtatttcacctgtacgtatggcagcagttcctgatcaacaatggtacgcagataatccgggttggcccgaatttgcggttgctcattcttcaggcgatcgaacgttttctgcgccgcctcgtccatcagcttatacggattggtctggtctgccgcggttgccgcactcagaggtgcaatcaccagcaaagcgaccatcattaaacgtttaaacatgcgtcggttctcctgaaattatttcgttgtacccacaggttcagtggtttcattattacctggcgcagcagctggcgcatcgccactattcttattgtcatcgcctttactaccgtaaaggaactgaccaatgagatcttccagcaccatcgcagacttagtgtcctgaattgtatcgccatccttcaggatagcagtccccagttccgggtcttcaaaaccgacgtttaatgccagatattgttcccccagcaggccggaagtacgaatgctcagcgaactggtatctggaatgtggttataacgttgttcaatttccagcgttacgcgcggcagataggttttcgggtccagcgtaatatccgccacccgacccacaacaacgccaccaatactgaccggagagcgcgctttcaggccgccaatgttatcgaacgtcgcataaagcgtgtaggtcggttcagtacgtatggacgtcacgttcgccgccttcaggcaaacaaacagcgccgccagcagtgctgctaataaaaagatacccacccaaatttcattttttttcgtttgcatgaactcaattcccaaacatcaatgcggtcagcacaaaatccagccccagaacagccagagacgagtggacaacggtgcgagtggttgcccggctaatcccggcagacgtcgggatggcgtcgtagccgttaaacaacgaaatccacgtcaccgtgatggcgaacaccacgctcttaatcagacagttgaccagatccatacgccagtcgacggcattttgcattgccgaccagaagaacccgctatcaatgcctttccaactgacgccgaccagagatccgccccagatccccacggcgacgaaaataaccgtcaacagtggtaatgaaataaccccagcccagaaacggggagaaataacccgacgcagcggatccaccgccatcatctccatactggagagttgctctgtagcgcgcatcaggccgatttctgcggttagcgccgaaccagcacgcccggcaaacaacaacgcggcaaccaccggccccagttcacgcagtagcgataacgccaccagcatacccagactggtttccgcactataagtggtcagaaccagataaccttgcagccccaacaccattccgatgaacacgccagaaaccacaataatcagcatcgacaggacgccgacattatagagctggcgcaccagcagcggcgcatgtttgcgaaattccggtttgccgaccagcgcattgaataacattaacccggcccgcccgaacgttctcagggttttaatccctttatgtccgagcgacgccagcgcatttaacagcatgagtggcttaactccctggtaaaagatcagcgtgataatcgccggcaggatagcggaacggaacaggcccgtcagctatcccgtccagaaactgacgtacgcgcggatcaggattcgcctgcaacgcctgggcactgccatgagcgacaatttttttgtccgccaggatccaggcgtgatccgcaatacttaacacttccggcacatcgtgagaaaccaccacacaagtcacgcccagcgcgctgttcagctcagaaatcagcttcaccagtacgcccatggtgatgggatcttgcccaacaaaaggttcatcaaacatgatgagatccggctccagcgcaatcgcacgcgccagcgctgcacgccgcgccatcccaccggaaagttcagaaggcattagtttagccgctccacgcagccccacggcctccagcttcatcatcaccgtactatgcaacaatggcgcgggaagttgggtatgttcgcgcagtggataggcgacgttgtcaaatacgttcatatcagtgaacaacgccccggactgaaataacatgctcatccgtttgcgcactgtatacaggcgcgaacgagacatcgccggaatattctcaccatcgaaaaggatctcaccatgatctggtgcgatttgcccgccaatcagacggagtagcgtcgttttaccgatgcccgatggccccatgatcgccgtgatcttccctcgcggcacggtcagggaaatattatcgaagatgcagcgattgccacgcgtaaaactgacatcgcgcatatcgactaaattcgccacagactgctccataattcacccttcgtcttgcgttgattttctaagcatggcgctcaatttaaccttgaacccaacatatttacagaatattacccgccgtggttagcgaaagctggcatttgttttactttttagccgcataaagtcaaaattaagcatccgttacggctttctgaaaatcttcagcggaccggcgagtatacctgaagaaaggacgttagatgcttttagctacggcactgttaattgttggtttacttttggtcgtttacagtgccgaccgcctggtttttgccgcgtctattctttgccgaacctttggcatcccgccgctgatcatcggcatgacggtggtcagtattggtacatcgttaccagaagtcatcgtctcgcttgccgcgtctctgcacgaacaacgcgatttagccgttggtacagccctcggctcaaacattatcaatatattgctgatcctcggtctggctgcgctggttcgtccttttaccgtccattctgatgttctacgccgtgaattacccttaatgttgttggtcagcgtggtggccggttccgtactctatgacggacaacttagtcgcagcgatggtatctttctcctctttctggctgtgctatggctgctgttcattgttaaacttgcacgtcaggctgaacgtcaggggactgacagcctgaccagagagcagcttgcagagctgccgcgtgacggcggattgcccgtcgcgtttttatggctcggcattgcgcttatcatcatgccagtggccacgcggatggtggttgataacgccacggtgctggcgaattactttgccatcagcgagttgacgatgggtctgacggcaattgctatcggaaccagcctgccggaactggcaaccgcaatagcgggggttcgcaaaggtgaaaacgacattgctgtcggaaatatcattggcgcaaacatttttaatattgtcatcgtgttgggtttacccgcgctgataacgccaggagagattgatccactggcgtacagtcgtgactacagcgtgatgttgctggtgagcattatttttgcgttgctgtgctggcggcgctccccgcaaccgggccgtggtgtaggggtattattaactggcggatttatcgtatggctggcgatgttgtactggttatcgccaatactcgttgaataactggaaacgcattatgtcgcacgtagagttacaaccgggttttgactttcagcaagcaggtaaagaagtcctggcgattgaacgtgaatgcctggcggagcttgatcaatacatcaatcagaatttcacgcttgcctgtgaaaagatgttctggtgtaaagggaaagttgtcgtcatggggatgggaaaatcggggcatattgggcgaaaaatggcggcaacgtttgccagcaccggtacaccttcatttttcgtccatcctggtgaagccgcgcatggtgatttaggcatggttaccccacaggatgtggtgattgctatctctaactctggtgaatccagcgaaatcacggccttaattccagtgcttaagcgtcttcacgtaccgttaatctgcatcaccggtcgcccggagagcagcatggcgcgcgccgcagatgtgcatctgtgtgttaaagtagcgaaagaagcctgtccgttagggctggcaccgaccagcagcaccaccgccacgctggttatgggcgatgccctcgctgtcgcgctgttaaaagcacgcggctttactgctgaagattttgcgctctcacacccaggcggcgcactgggtcgtaaacttctgctgcgcgtaaacgatattatgcatacgggcgatgagatcccgcatgttaagaaaacggccagtctgcgtgacgcgttgctggaagttacccgcaaaaatcttggtatgactgtcatttgcgatgacaatatgatgattgaaggcatctttaccgacggtgatttacgccgtgtcttcgatatgggcgtggatgttcgtcagttaagtattgccgatgtgatgacgccggggggaatacgtgtgcgccctggcattctggccgttgaggcactgaacttaatgcagtcccgccatatcacctccgtgatggttgccgatggcgaccatttactcggtgtgttacatatgcatgatttactgcgtgcaggcgtagtgtaaagattcaaggataaacaacaatgagcaaagcaggtgcgtcgcttgcgacctgttacggccctgtcagcgccgacgttatagcaaaagcagagaacattcgtctgctgatcctcgatgtcgatggcgtactgtcagatggcctgatttatatgggcaataatggcgaagagctgaaagcgttcaatgttcgtgacggttatggcattcgttgtgcgctcacctctgatattgaagtcgctatcattaccgggcgaaaggctaaactggtagaagatcgttgtgccacattggggatcactcacttgtatcaggggcagtcaaacaaactgatcgcctttagcgatctgctggaaaaactggcgattgccccggaaaatgtggcttatgtcggcgatgatctcatcgactggccggtaatggaaaaagtgggtttaagcgtcgccgtggccgatgcgcatccactgttgatcccgcgcgccgattacgtgacgcgcattgctggcggtcgtggcgcagtgcgcgaagtttgcgacttattactcctggcgcagggcaaactggatgaagccaaagggcaatcgatatgagtaaagccagacgttgggttatcattgtgctatcactggcggttctggtgatgatcggcattaatatggccgaaaaagacgataccgcccaggtggtcgtcaacaacaatgatcccacctataaaagcgagcatacggacacgctcgtctataacccagaaggggcactaagctatcgattgattgctcaacacgttgaatattattccgatcaggccgtttcgtggtttacgcagccggtacttaccacgtttgataaggataaaatcccgacatggtccgtaaaagcagataaagccaagctgaccaatgaccggatgctctatttatatggacacgttgaagtcaacgcacttgtgccagactctcaacttcgcagaatcacgacggataacgcgcagatcaatctggtgacgcaggatgttacctctgaagacctcgtcacgttatacggaacaacatttaactccagcggtctgaaaatgcgcggcaacttacgcagcaagaacgccgagctgattgaaaaggttagaacatcctatgaaattcaaaacaaacaaactcagccttaatcttgtgcttgccagctcacttctggccgccagcattccggcatttgccgtaaccggagacactgatcagccgatccacattgaatcggaccagcaatctcttgatatgcaaggcaacgtggttacctttaccggtaatgtcatcgtcacccagggcaccatcaaaattaatgccgacaaagtggtcgttacccgtccgggcggcgaacaaggtaaagaagtgattgacggctacggtaaaccggcaacgttctaccagatgcaggacaacggtaaacccgttgaaggtcacgcttcccagatgcactacgaactggcaaaagattttgtcgttctgacgggtaatgcttatctgcagcaggtcgatagcaacattaagggcgataagatcacttacctggtgaaagagcagaaaatgcaggctttcagcgacaaaggcaagcgcgtaacaaccgttctggtgccgtcgcagctgcaggacaaaaacaacaaaggccagaccccggcacagaagaagggtaattaattcgttatggcaacattaactgcaaagaaccttgcaaaagcctataaaggccgtcgcgtggtagaagacgtcagcctgaccgtcaactccggggaaattgtcggtctgctggggccaaacggtgccggtaagaccaccactttctacatggttgtaggcattgtgccgcgcgatgcgggcaacatcattattgatgatgacgatatcagtctgctgcctctgcatgcacgcgcgcgccgcggtatcggctatctgccacaggaagcctccattttccgtcgcctcagcgtttacgataacctgatggcggtactgcaaattcgtgacgacttgtctgctgaacaacgtgaagaccgcgcgaacgagctgatggaagagtttcacattgagcacctgcgtgacagcatggggcagtcactctccgggggtgaacgtcgccgtgtagaaattgcccgcgcactggctgcgaatccgaaatttattctgctcgacgaaccgtttgccggggttgacccgatctcggttatcgacattaaacgcatcattgagcacctgcgcgacagcggcctgggcgtgctgatcactgaccacaacgtgcgtgaaacactggcggtttgtgaacgcgcttatatcgtcagtcaggggcatttgatcgcccacggcacgcctacagaaatcttacaagacgaacacgttaagcgtgtataccttggggaagacttcagactctgatagggtagaagtttgcgacgttttagcaggagagtacgattctgaacatgaagcaaggtttgcaactcaggcttagccaacaactggcgatgacgccacagctccaacaggcaattcgtctgttgcagttgtcgacgctggaacttcagcaggagctacagcaggcgctggagagtaatccgctgcttgagcaaatcgacactcatgaagaaatcgacacccgcgaaacgcaagacagtgaaacgctggacaccgccgacgcgctcgaacaaaaagagatgccggaagagctgccgctcgatgccagttgggacaccatttacaccgctggtacaccatccggcaccagcggtgactacattgacgacgagctgccggtctaccagggcgaaacgacgcagaccttgcaggattacctgatgtggcaggttgagctgacaccgttttccgacactgaccgcgctattgctacctctatcgtcgatgccgttgatgaaaccggttatctgactgtcccgctggaagatattctcgaaagtataggcgatgaagagatcgacatcgacgaagttgaagccgtccttaagcggatccaacggtttgatccggtcggtgtggcggcaaaagatctgcgtgactgtctgctgatccaactctcccaattcgataagaccacgccgtggctggaagaggccagactgatcattagcgatcatctcgatctgttagccaatcacgacttccgcactttaatgcgcgtcacgcgtctgaaagaagatgtgctgaaagaagccgtcaatctgatccagtcgctcgatccgcgccccgggcagtcgatccagactggcgaacctgagtatgtcattccagatgtgctggtgcgtaagcataacggtcactggacggtagaactcaacagtgacagcattccgcgtctgcaaatcaaccagcactacgcctcgatgtgcaataacgcgcgcaacgatggtgacagccagtttatccgcagcaatctgcaggatgccaaatggttgatcaagagtctggaaagccgtaacgatacgctactgcgcgtgagtcgctgtatcgttgaacagcagcaagccttctttgagcaaggtgaagaatatatgaaaccgatggtactggccgatatcgcccaggctgtcgaaatgcatgaatcgacgatatctcgcgtgaccacgcaaaaatacctgcatagtccacgaggcatttttgaactgaagtatttcttttccagtcacgtcaataccgagggcggcggcgaagcttcctccacggcgattcgtgcgctggtgaagaaattaatcgcggcggaaaacccagcgaaaccgttgagcgacagcaagttaacctctttgctgtcggaacaaggtatcatggtggcacgccgcactgttgcgaagtaccgagagtctttatccattccgccgtcaaaccagcgtaaacaactcgtttgacccaaccgataaggaagacactatgcagctcaacattaccggaaataacgtcgagatcaccgaggcactgcgcgaatttgttacagccaaatttgccaaacttgagcaatattttgaccgaatcaaccaggtctatgttgttctgaaagtggagaaagtcacccacacctcagatgcaacactgcatgtaaacggtggtgaaattcatgccagcgcggaaggtcaggacatgtacgctgccattgatggcttaattgataagctggcacgccagttgaccaaacataaagataaactgaaacaacactaattgtccgggcaattagcatgtgcatggcggtctgttgtgcggcacaacgggccatttgtacggttaatgctccgagcctgttccactgtttgagtgggcaggttcttaggtgaaattatgacaaataatgatacaactctacagcttagcagtgttcttaacagggaatgtacgcgaagccgcgtccactgtcagagcaaaaaacgcgccctggaaatcatcagcgagctggcggcgaaacaacttagcctgccgcctcaggtggtttttgaagctatcctgacgcgggaaaaaatgggcagtaccggtatcggcaatggtattgccattccgcatggcaaactggaagaagatactctgcgcgccgttggcgttttcgttcagctcgaaacgcctatagctttcgatgccatcgacaaccaaccggtggacttactttttgccctgctggtgccggcagaccaaactaaaacgcacctgcatactctgtcgctggtggcgaaacgtctggcggacaaaaccatctgccgccgtttacgcgcagcccagagcgatgaagagctgtatcaaatcattacggataccgaaggtactccggatgaagcgtagttattcggtaatgtctcttttagacgttgtgaggagaaacagtacatggtactgatgatcgtcagcggacgttcaggttcaggtaaatctgtcgccctgcgtgcgctggaagatatgggtttttactgcgtggataaccttcccgtagtgttgttacccgatctggctcgaaccctggccgatcgcgagatttctgccgccgtcagcattgatgttcgtaatatgccggagtcaccagaaatattcgaacaggcgatgagtaacctgcctgacgctttctcaccgcaactcctgttcctggatgccgaccgtaataccttaattcgtcgttacagtgacacgcgccgactgcatccgctttccagcaaaaacctgtcgctggaaagtgctatcgacaaagaaagcgatttgctggagcctctgcgttcgcgagcggatctgattgtcgatacctcagaaatgtccgttcacgagctggctgaaatgctgcgtacccgtctgctgggtaaacgtgaacgcgaactgaccatggtctttgagtctttcggcttcaaacacggtatccctatcgatgcagattacgtctttgacgtgcgcttcttgccgaacccgcactgggatccgaaactgcgtccaatgacaggtcttgataaacctgtcgccgcgttcctcgaccgccacacagaagtacacaattttatctaccagacgcgaagctatcttgagctatggttacctatgctggaaaccaacaaccgtagctacttgacggtcgccattggttgtaccggcgggaagcaccgttcggtgtatattgcagagcaactggcagactacttccgctcgcgcggtaaaaacgtccagtcacgccatcgtacgctggaaaaacgtaaaccatgaccgtcaagcaaactgttgaaatcacaaacaagctgggcatgcatgcccggcctgcaatgaagctgtttgaattaatgcagggttttgacgctgaagtgctcttacgtaatgacgaaggcaccgaggctgaagccaacagcgttattgcgctgctgatgttggattctgccaaaggacggcagattgaagttgaagcgaccggtccacaggaagaggaagcactggccgccgttatcgccctctttaattctggttttgatgaagattaatcttcatcactttgacatacaactcccttcaaactccccccgacaataagaaaatcacgtactgaaatcgttctcaatcaacgtcatttgtacattttgtgcgcttttcactttcagaagaaccttaagaaaaccttaagaggcattgtttaggttttgtttaagttaatcgaccatactggagatcgtcagaaaatatttccaggagatggcatgattcgcttatctgaacaaagtcccctgggcaccggaagacatcggaaatgttatgcgcatccggaagatgcccaacgctgtatcaagattgtctaccatcgtggcgatggtggcgataaagagatccgccgtgagttaaagtactacgcgcatcttggtcgccggttaaaagactggagtggaataccgcgctatcacggtaccgttgagacggattgcggaaccggttatgtctacgatgtgattgcagattttgacggcaagccttccattacgctgaccgaatttgctgaacaatgccgttacgaagaagacattgcacaactgcgccagctactgaaacagctgaagcgttatttgcaggataaccgtatcgtgacgatgtcgctgaagccgcagaatatcctctgtcaccgcatcagtgagtcagaggttatcccggtcgtctgcgacaacattggtgaaagcacattgattccactggcgacctggtcgaagtggtgttgtctgcgtaagcaagagcggttatggaaacgatttatcgcccaaccggcgctggctattgccctgcagaaagatctgcaacctcgtgagagcaaaacgctggccctcacttcgcgcgaagcttaatccagctggtgttgttgcataaacggctcaccgcctaactgatacatctgccgtaaaatccacgcctgacggctacgcacgtagcccgatggcgaggagactttgaaacgaagtggattaggtaatacagctgccagtaatgcagcttccgaccgggtaagtttgctcgcgggtttgtggaaataacgttgtgccgcagcttcgacgccaaacacaccgtcgccaaattcggcgatattcaggtaaaccgtcaggatacgctttttgctccagaccgtttctatccccagcgttaatccggcttccagcccttttcgaacccagctacgcccatcccataaaaagagatttttggctgtctgttgagaaatcgttgaagcaccgcgaatacggttttcattgcgctcgttgtgcgccagggctttctcaatggaagcgacatcaaagccccagtgctcaggaaatttctgatcttctgcggcaatcaccgccagtcccatccacggcgagatttgatccatactgacccagtcagaatgtgccacgtaacgaaaattgccatgcagccaggcgctgacctgtcgctcgaccattaccgctgagaagggaacaggcgcaacgctaaacaacgcgatgcccccgccccagaaaacggcgaggacaaccattaaccgcaaaagaaaacggcgaacgaaactaaacaccgttaagcggcttttactcattcagccagaaccagcacgcgggaaaccagcttatcaatgccgctcgccgcttctgcaatgttctgcgccagcatatatgctggggtggtgacaatcttattgtcttcatcaaccacgatatcatcgacaggacacggcacatgctccgcgcccatctcttccagcacttctgcggtatcgatatcagtaccgatggtcaaacgcagcgggaaatcgaaaattttcggcagcatcgccggggcaatacacataaaaccaagcggttttccggcctgatgcatcgcttgtgccagcgcctttaattcacggtcaacggtgcattcgctaccaagactggcaaaattgcttaaattcttcgccgcgccaaacccccccggcacaatcaacgcatccagttcagcggcatcggcctgggccagaggacggatttcaccgcgcgttattcgtgccgcttcaatcagcacattgcgcgtttccgtcatcgcttcgccagttaaatggttgataacatcaacctgctgcttatccggtgcaaagcagaccgcctgcgcaccgctgcgtgaaatagctaacaacgtcaacaccgcttcatgaatttcagaaccgtcatagacgccgcatccgctcagaattacgccaattttcttcattgtgatcatcctttcgcaattgactgaaacacattaatttttttaataaaaatggtacgcatcacacatttaactgattcatgtaacaaatcatttaagttttgctatcttaactgcgtgcggcctgaaaaacagtgctgtgcccttgtaactcatcataataatttacggcgcagccaagatttccctggtgttggcgcagtattcgcgcaccccggtctagccggggtcattttttagtggcttttgccacccacgctttcagcacttctacgtcgtgacgccactcttctttcatctcttcaatccattcaccgacgttatcttcccaggccggaaggtcaggagactgaatttgctgacccagctgttgcagatggcgtaaccccactgaccccgccgcacctttaattttatgtccttcctcaacaatgccttttttatcctgcgccgtcagattcgactccagcacgctgacatagcccggcatcatcttctcaaacaccgctaacccgtcggtgatcagcttcggtcctacaagttcgagatactgttccagcatgggaatatcgagcaatgcttctgatttactgttctcttctgtcgtcaccgtactctcctcatcatcctgggtatcccagaatttcttgatcatcgcggttagcgccggaacagaaagcggcttactcagcacatcatccattccagcattgaggtactcttgtttgtctttcagcacgttagcggttaaggccaccagcggcggtaaatcctcgcgcggataacgtttcgtcagttcacgagagatatccagcccggtcatatctggcaactgaatatccagcaacaccaggtcgtattcgcccggtttaaacatctccagcgccgccttgccggtcatggcgacatcaacgctgttacctaatttttccagcacagaacgcgcaacaatcacgttcagttcaatgtcttccaccagcagcacattcagcgccggtaaaggcatatcgtcttcatcaaacgcatcatcgacctcttctgctaccgacggtgcgtggatcgtcaacgtaaaggttgaacctttgccctgttcgctggtaaccgtaatatcgccgcccatatttttcgccagacgacgagaaacggccagaccaataccggtgccggtggcaggtttaccgccatgactgtctttcacctggtaatacatggcgaaaattttatccagctcatcctgcggaatgccgataccagagtcttccacttcaaaatgcagcatatcgccttcatcgtagcgcacgcgcacggtaacctggccttgctgggtgaatttgacggcgttactgatgaggttccacaggatctgccgtaaacgcgtcccgtcggtaatgacctgatgcggtaatggcagcgtcggctccaggttaaagcgcaatcctttttgttgcgcctgcaatgcggagagattttccagatcggcaaggaagctggtgaaatcaaccggttgattatcaagctggaccttgcgccgttccatcttatccatgtcgataatatcgttaaagatattccccagcgtgacggccgaaacatggatggtcttgagatatttttcctgctcggcggtgagttcggtatccagcagaatgcggctcagaccgacgataccgttcagcggtgtacgcaattcgtgactgatggtggagataaacgtcgttttgtcgcggctggcccgttcaagcgcatcctgataccgcttacgctcggtaatgtcgcgaccaaagcccatcaaaccgtgacgtttacccacgcggtcgtagtacggcactttacggatttcaaagcaggctttgcgcccgtccgggtaatccagccactgttcataggtcagtgacacattatgacggaacactttttcatcggtttcaatgacttttgcggcggcttccggtgagtaaacatcagcaggtttcaggtgaaccagttgtttttcgctttttccggtcagcagctccatcgcgcggttacagccggaaaactctttatcttcgttacgataaaaaaccaggtcgggtgaagcatcaaggaaggaacgtaagaatgaggattgctgctcgagctgaatttgtgtctcttcgcgctctttgatttcaattttcagttggccgaaggtttcctgcagttctgcttccgctttttcacgaacggcaatttcctgatttagctgggcaatattatcttttaactgaacgttgaggctcaaatcgcgctcgcgcatctcctccagtttttgcaccagccgtgacagacgttgtcgtgactcctccagttgctcgacgaccaccgatagaaagtagaccgcccacggcgtaatcagcaaaccaaagaagatagaacgaataacatcaatgctttcgacctgaccatgcagcaccatggttaccgccatttgtaccacaatggcaagaacgacgagggccagcgccagcaacattgagaagcgcaccagacctaacttcatcatcaggtcaacataatactgcgccagcagacgaatttgcttcattagggaattccttcacgacaacctgccccaataatacccaattctgacagttacgttataaattgtgtgagaaatgcggaattcccctcaacgacccactccgttggaggtagccacggacgtcccagcgccgatccctgtacgccatgttcattcagatagcgatccagctcgaccattcccgtccatcgattttcgcaccacagcggagcaagcagcgtcgggcgacgggcgctggcggaaatgcggtggtagatcacttccggtggcgtatggcgaatcatttctccggcagtgagcgtgtaatcctccagttcaataccgttcaaacgccccgcttcccaggctttcgccataatgctgcctttcacaatatgcagcggatgcagctttatgccgtccacgccggtttcaaccactcgctccagcgtttgcaaacattcagcctgcccttcgccaggcaggccgacaattaagtgggaacacaccttcagcccgcgctgacgtgccagctgggttgtacgctgataacaggcaaaatcatggccgcggttgatgcgatgcagtgttttgtcgtgggaggtttgtagccccagctccagccacacttcgtaaccctggtccttatattcgcaaagcagatccagcaccgcatccggcacgcagtccgggcgggtacccacacacaaaccgacaatattggcctggctcaccgcctgctgatacatagaacgcagcacctgaacttccgcaaaggtgctggtatacgcctgaaagtaggccagatagcgtttagcgcggttaactaaattcgcctggtgcgccagttgctcggcaatggaacgatgctgctgcgcttcatcggcaaacgaggcaacattacagaatgtgcagccaccacgcccgatggtaccgtcacggttagggcagctaaaaccgccgtgcagcgtcagcttatgcaccttttgcccataacgacgggtgagatcaccaccaaacatattgactaatttctgtaactgcataatctgatagaccgcgccttgaaaagaggccaaagcctgccatttttagctcaattcggcgatgacctggatcaatcgtcccggcctgcttttatcaactgcataatcaatcaaaattaccgaaatttcatgcataatcacataaatcacttttgcttatcttgtgtcagatttttttatctcctgatggattttaggcaaaaacagtagcatgaaacgtcattaccaattaaggcagtataaaatgctggttttgtcgtcagttcaaggcaggataagggttaacacacctttatgacagtcaggaattgactgtttctctaacgacttcccttttagccttaaagataaaatccattttaatttcagtcatttaataaagaattttgcgctaaagcacatttctgtaccaataagcttgccatttgacctgtatcagctttcccgataagttggaaatccgctggaagctttctggatgagcagcctgctcatcatatttatgcagtaattgagatcccctcttcaccgtattaaccgatgcgaaaaggacaacaagggggcgaatgcgaggcgcgcgtatgacacgcaaaccccgtcgccacgctctttctgtgcccgtgcgcagcggttcggaagtggggttcccgcagagcctgggggaggttcacgatatgttgtacgataaatcccttgagagggataactgtggtttcggcctgatcgcccacatagaaggcgaacctagccacaaggtagtgcgtactgcaatacacgcactggcccgcatgcagcaccgtggcgcgattctcgccgatggtaaaaccggcgacggttgcggcttgctgttacaaaaaccggatcgcttttttcgcatcgttgcgcaggagcgcggctggcgtttagcaaaaaactacgctgtcgggatgctcttcctgaataaagatcctgaactcgccgctgccgcacgccgcatcgttgaagaagaactgcaacgcgaaaccttgtcgattgtgggctggcgtgatgtccccactaacgaaggcgtgctgggtgaaatcgccctctcctctctgccacgcattgagcaaatttttgtgaacgccccggcaggctggcgtccacgcgatatggagcgccgtctgtttatcgcccgccgccgcattgaaaagcgtctcgaagccgacaaagacttctacgtctgtagcctgtcgaatctggtgaacatctataaaggtctgtgtatgccgacggatctgccgcgcttttatctggatcttgcggacctgcgtctggaatcggccatttgcctgttccaccagcgcttctccactaacaccgtaccgcgctggccgctggcgcaaccgttccgctatctggcgcataacggtgaaatcaacaccatcaccggtaaccgccaatgggcgcgtgcgcgtacttataaattccagacaccgcttatccctgacctgcacgacgccgcaccgttcgtcaacgaaaccggctctgactccagttcgatggataacatgctggaactgctgctggcaggcgggatggatatcatccgcgccatgcgtctattagtaccacccgcctggcagaacaacccggatatggacccggaactgcgtgccttctttgactttaactccatgcatatggagccgtgggatggcccggcgggcatcgtgatgtccgacggtcgttttgccgcctgtaacctcgaccgtaacggtctgcgtccggcgcgctacgtcatcaccaaagataagctcatcacctgcgcctctgaagtcggtatctgggattaccagcctgacgaagtggtcgaaaaaggccgcgtcgggccaggcgaactgatggttatcgacacccgcagtgggcgtattctgcactcggcagaaaccgatgacgatctgaaaagccgccatccatataaagagtggatggagaaaaacgtccgccgactggtaccgtttgaagatctgcccgatgaagaagtgggtagccgcgaactggacgacgacacgcttgccagctaccagaaacagtttaactacagcgcggaagagctggactccgtaattcgcgtactgggcgaaaacggtcaggaagcggtcggttcgatgggcgatgataccccattcgccgtgctctccagtcagccgcgcattatttacgactacttccgccagcagtttgcccaggtgactaacccgccaatcgacccgctgcgtgaagcgcatgttatgtcgctcgccaccagtatcggtcgtgaaatgaacgtcttttgcgaagcagagggccaggcgcaccgtttaagctttaaatcgccgattctgctctactccgatttcaaacagctcacgacgatgaaagaggagcactaccgcgcagatacgctggatatcacctttgacgtcactaaaaccacgctcgaagcgacagtcaaagagctgtgcgacaaagccgaaaaaatggtacgtagcggcaccgtgctgctggtgctctccgaccggaatatcgctaaagatcgcctgccggttccagccccgatggcggttggcgcgatccagacccgtctggtcgatcaaagcctgcgttgcgatgccaacatcatcgtcgaaaccgccagcgcccgcgatccgcaccacttcgccgtgttgctgggcttcggcgcgacggctatttatccataccttgcctatgaaacgctgggccgcctggtagacacccatgcgattgccaaagattatcgtaccgtgatgctcaactaccgtaacggcatcaacaaaggcttgtacaaaatcatgtccaaaatgggcatctccaccatcgcctcttaccgctgctcgaaactgtttgaagcggtcggtctacacgatgatgtagtgggcctgtgcttccagggggcggtcagccgcattggtggagcaagctttgaagacttccagcaggatctgctgaatctgtcgaaacgtgcctggctggcgcgtaagcccatcagccagggcggtctgctgaaatacgtccacggcggcgaataccacgcctacaacccggacgtggtgcgcacgctgcaacaagcggtacaaagcggcgagtacagcgactatcaggaatacgcgaagctggttaatgagcgtccggcaaccacgctgcgcgatctgctggcaattacgccgggtgaaaacgcggtcaacattgctgatgttgaaccggcaagcgaactgtttaaacgctttgataccgccgcgatgtctatcggcgcgttaagcccggaagcccacgaggcgctggcggaagcgatgaacagcatcggcggtaattcgaactccggtgaaggcggcgaagacccggcgcgctacggcaccaacaaagtgtcgcgcatcaagcaggtggcttccggtcgctttggggttactccggcgtatctggtcaatgccgacgtcattcagattaaagtcgcccagggcgcgaagccaggcgaaggcggtcagttgccgggtgataaagtcacgccttacatcgccaaactgcgctattcggtgcccggagtgacgctgatctccccgccgccgcaccacgatatctactctatcgaggacttagcgcagctcattttcgacctcaagcaggttaacccgaaagcgatgatctccgtgaagctggtttccgaaccgggagtaggcaccatcgcgactggcgtggcaaaagcttatgcggacttgatcaccatcgcaggctatgacggcggcaccggcgcaagtccgctttcatcggtgaaatacgcaggctgtccgtgggagctggggcttgttgaaacccagcaggcgctggttgctaacggcttgcgtcacaagatccgtttgcaggtcgatggcggcctgaaaacgggtgtcgatatcatcaaggcggcgattctcggcgcagaaagcttcggcttcggcactggcccgatggtggcgctcggctgtaaatatctacgtatttgccatctgaacaactgcgcaacgggtgtagcaactcaggatgacaaactgcgtaagaaccactatcacggcctgccattcaaggtgacgaattactttgagtttatcgcccgtgaaacccgcgagctgatggcacagcttggcgtaacacgtctggtggatctgattggtcgcaccgacctgctgaaagagctggacggtttcaccgccaaacagcagaagctggcgctgtcgaagctgctggagactgccgaaccgcatccaggtaaggcactctactgcaccgaaaacaacccgccgtttgataacggcctgctgaacgcgcagttgctgcaacaggcgaaaccgtttgtcgatgagcgccagagcaaaaccttctggttcgatattcgcaacaccgaccgttctgtcggcgcgtcgctttcaggctatatcgcccagacgcacggcgatcaggggctggcagccgatcctatcaaagcgtacttcaacggcaccgcaggccagagcttcggcgtgtggaacgcgggcggcgtggaactgtacctgaccggtgatgccaacgactatgtcggtaaaggcatggcgggcggcttaatcgccattcgtcctccggttggttccgccttccgcagccatgaagcaagcattatcggcaacacctgcctgtatggcgcgaccggtggtcgtctgtatgccgcaggccgcgcgggtgaacgtttcggcgtgcgtaactccggtgctatcaccgtggtagaaggcattggcgacaacggttgtgaatatatgacgggtggtatcgtctgcattctgggtaaaaccggcgttaacttcggtgcgggcatgaccggcggtttcgcttacgttctcgatgaaagcggcgatttccgcaaacgcgttaacccggaactggtcgaggtcttaagcgttgacgctctggcgatccatgaagagcatctgcgtggtcttatcaccgagcatgtgcagcataccggctctcagcgcggtgaagagattctggcgaactggtcaaccttcgccactaaatttgcgctggttaaaccgaagtccagtgatgtaaaagcactgctgggtcaccgtagtcgtagcgcagctgagttgcgcgtgcaggcgcagtaaggggtagcaacaatgagtcagaatgtttatcaatttatcgacctgcagcgcgttgatccgccaaagaaaccgctgaagatccgcaaaattgagtttgttgaaatttacgagccgttttccgaaggccaggccaaagcgcaggctgaccgctgcctgtcgtgcggcaacccatactgcgagtggaaatgcccggtacacaactacatcccgaactggctgaagctcgccaacgaggggcgtatttttgaagcggcggaactgtcgcaccagaccaacaccctgccggaagtttgcggacgagtctgcccgcaagaccgtctgtgcgaaggttcctgcactctgaacgatgagtttggcgcggtgaccatcggcaacattgagcgctatatcaacgataaagcgttcgagatgggctggcgtccggatatgtctggtgtgaaacagaccggtaaaaaagtggcgattatcggcgcaggcccggcaggtctggcgtgtgcggatgtcctgacgcgtaacggcgtaaaagccgttgtcttcgaccgtcatccagaaattggcgggctgctgaccttcggtattccggccttcaagctggaaaaagaggtaatgacgcgtcgccgtgaaatcttcaccggcatgggtattgaattcaaactcaataccgaagtgggccgcgacgtacagctggacgatctgctgagtgattacgatgccgtgttccttggcgtcgggacttatcagtcaatgcgcggcgggctggaaaacgaagacgccgatggcgtgtacgcagcgctgccgttcctcatcgccaacaccaaacagttaatgggctttggtgaaacccgcgacgaaccgttcgtcagcatggaaggcaaacgcgtggtggtccttggcggtggcgacactgcgatggactgcgtgcgtacgtccgtgcgccagggagcgaagcacgttacctgtgcctatcgtcgtgatgaagagaacatgccgggttcccgccgcgaagtgaaaaacgcgcgggaagaaggcgtagagttcaaattcaacgtccagccgctgggtattgaagtgaacggtaacggcaaagtcagcggcgtaaaaatggtgcgtaccgaaatgggcgaaccggacgccaaaggccgtcgccgcgcggagatcgttgcaggttccgaacatatcgttccggcagatgcggtgatcatggcgtttggtttccgtccacacaacatggaatggctggcaaaacacagcgtcgagctggattcacaaggccgcatcatcgccccggaaggcagcgacaacgccttccagaccagcaacccgaaaatctttgctggcggcgatatcgtccgtggttccgatctggtggtgaccgctattgccgaaggtcgtaaggcggcagacggtattatgaactggctggaagtttaagcgaggtaacaatgaattcgccagactgtgtctggcgaatcaaattactgacgaagtgcgcgttgttttctggcaaatgcggcatgagcgtttgacctttcctataatagggataattttcaataaattgtgctttgttcaccaagtctgatgagtgaagcacatcaagcaatttctcatttacaatccgtctcaattacttgttaacacctctgacaataccgattctgcaagctattcagtcttttcattccatgtaaattgtctcgatattaatatacaaaatatgaatataaaaaaccaatatattatccttaattatctatatattttcctatttttcagcgcaaacattcatgtaatgaataattatcaccacaaaccacctcaccagcaccttattattcacatgatcgtaactataaaattcattaaataaatacatcccagcaagttggctatttctgaacgagttatttatttacattcacaaacagatatatatactgcttcagctttttattttaaaaaataaatttgttattaaggatatgttcatatgtttttcaaaaagaacctcacaacagctgctatttgtgcagcactttctgttgcagcattcagtgccatggcaacagattcaactgatacagaattaactatcatcggcgagtatacccctggtgcatgtaccccagttgttacgggcggcggcattgttgactatgggaaacatcataacagtgcgctgaatccgaccggtaaaagtaataaactggttcaactgggccgcaaaaacagcacattaaatataacctgcacagcaccaacgctaattgctgtaacctccaaggataaccgtcagtcgaccattgtagcgttaaacgacacatcctatattgaaaaagcttatgatactctcgtagatatgaagggaacgaaaaacgcctttggtttaggttctgcgcctaatggacaaaaaattggcgctgcatccattggtattgacaggtctaatggtgggattcacgcggcggacgatacaggtgaaattcctgtcgacctgattcaaactgaccactggtcagcagcgacccccacatggaaagcctcatctaatggcgcattctgctcgctgacaagttgctcagcaatcgagcgcggttattctgttgcaaaaacaggggaactgacacctgttgccattacagcggtcaccttcccgttactgattgatgctgcggtaaatgacaatactattcttggttctgatgaaacgatcaaactggatggtaacgtcactatcagcgttcagtatttataagaacttgtaatacagtttttatttttacgcattaaccagttagctataactcggacagattatgccctatgacatggtctgtcttaatcaatctcatcgcaaacagtgcataacatatattaacaatatgtttctgcgttatttatcattattacaggagttttaatttaaatgctcagacacattacattcactgtatttataacaacatcaatgaataccttagccacagggatggttcctgaaacatcagtattgctggttgatgaaaagcgtggtgaagctagtattaatattaagaatacagatgatcatccttcattgctttacaccaccattgttgatttgcctgaaagcaataaatcaattcgtttaatcccgactcagcccgttattcgtgttgaagccggtcaagtacaacaggttcgatttttacttcaggcgactgttcctctgcaatcagaagagctgaaacgcgtaacgttcgaaggtattccaccaaaagatgacaagagcagcagagttactgtttcaattcgtcaggatctacctgtactgatccacccggcttccctgccggaagagcgagagacctggaaattcctggaatggcgtaaaaatggcgaccaaattgagattagcaaccccagtaattatgtcgttcgtatgaccttacaatttaaaacgctcccttcaggaaaaacgggggctataaataagacctattttctaccacacaccagtacaactactgcattaacaaacgctacggatacaaaagtcgagttttacccagccagccgatatggttatcgcggtaataaatatgtcactgacttaaaataactttgcctggagcgacaaggatgttaaaaaaaacgttactggcctacaccattggttttgccttttctcccccagccaatgcagatggtatagagattgccgctgttgattttgatcgggaaacattaaaatcactaggtgtagatcctaatatatcgcattatttttcccgttcagcccgttttttgccaggtgaatattcactgatagtatcagtaaatggcgaaaaaaaaggcaacattgctacgcgctttgatgaaaatggcgacatttgtcttgatcaggcatttctgcaacaagccggtttaaaaattccttctgaagaaaaaaatggctgttacgactatatattgtcctacccgggtaccacaatcacaccattacctaaccaggaagcgttagatattatcgtttcaccacaggcgatcattcccatagggttggatctcacaaacgcagcaactggtggaacagctgcgctgctaaactactctctgatgagcagccgtgcagaattttctaatgggagttcggactactcccaggctgcacttgaaggcgggattaatattaatgactggatgttacgcagccatcagttccttacacaaacaaatggcacattcagtaaccagaactcgtcaacctaccttcaacgtacctttacagatcttaaaacactcatgcgagcaggtgaagttaacctcaataatagcgtgttggaaggagccagtatttacggtatcgaaatcgcaccggacaacgcattgcaaaccagcggcagtggtgtgcaagttactggtatagccaacacctctcaggctcgtgtcgagattcgtcaacaaggagttttaattcattccattctggttcctgcgggcgcattcactatccctgatgtacctgttcgcaatggtaatagtgatcttaatgtcaccgttgtcgaaacagacggtagttcgcacaactatattgttccctccaccctgtttaatcagcatgtagaaagcttccagggttatcgcttcgcgatagggcgggtagacgatgactatgacgaatcaccttgggtaattagtgcatcgagcggatggaatctgacacgctggagtgcaatgaacggcggcgttatcgtagcagaaaattatcaggcggcatcaatccggtcgagtctggttcccctgcccgatttaacagtgagcagccaaattagtacatcgcaggatacgaaagactcactgcaaggacagaaatatcgtcttgacgcgaactacaatctcccattttcacttgggctaacaaccagcctcactcgatctgatcgccattatcgcgaactgtctgaagcgattgatgatgattataccgatccgactaaaagcacttatgcgcttggtttaaactggtctaactccattctgggtggtttcaacatcagtggctataaaacatatagttacgacggtgacaatgactcaagcaaccttaatattaactggaacaaagcgttcaaacacgccacggtttccgtcaactggcagcatcaacttagtgcttcagaaaataatgaagacgatggtgatctgttctacgtcaacatcagtattccatttggcagatcaaacaccgccacactgtatactcgccatgacgatcataaaacccactatggtactggtgtcatgggagtcgtctcagatgagatgtcctactatgtgaatgctgaacgagatcacgacgaacgtgaaacgagcttgaacggcagtatcagttccaatctccattacacccaagtcagccttgccgcaggagcaagcggcagtgatagccgtacttacaacggtacgatgtcaggtggtattgccgtacatgatcagggagtgaccttttcaccgtggactatcaatgacactttcgccatcgcaaaaatggataacaatattgcaggtgtcagaattacatctcaggcaggcccagtatggacagattttcggggtaatgccgtcattccatcaatccagccgtggcgaacatcaggagttgagatcgataccgccagcttgccaaaaaatgtcgatatcggtaacggcacaaaaatgatcaaacaaggccgtggtgcagtagggaaagtcggattcagtgcgataacacaacgccgtgcattactcaatatcacactttccgacggcaaaaaactgcccagaggcgttgcgattgaagatagtgaaggcaactatctgacaacatcagtggatgacggtgttgtattcctcaataacatcaaaccggacatggtgctagatataaaagatgagcagcaatcatgccgtattcaccttacattcccagaagatgcaccaaaagatgtgttctatgagacagcaacaggagagtgccaatgaaacggataataacaggatgcctgctgctgaacttcgccatggccgctcaggcagagtgtaatatctccagtagcatacaaaatatcgactatggcaaacgaagtgctgccatgcgccaagttgaccggggtaaaacaacacaattagcagacagaacaatcacgctggtaatgcaatgcgatcaggacgctcatattcgtgttcagttgaataccgctaatatttccaacaacggatttggatttggcccgaatggttcattaaatctgatcgccagcgatgcattttcaggtagtaacaatctcgacctggcgttagccagtggcaaaaatgacaatccgggcagcacaggaacagcatcaattagtacttcccccaataattggctggtgtttatgcaaaatggtcaagaagtggtaattgatagcggtaaaagcgttagcctcacactgacaatggctccagcttttaaggatgaaggggaactaaccgacatgacagatattacaggcaatctgacggtcctggtggaggcaaaatgaacaatgtaaaattactgattgccggaagtgccttttttgccatgtcagcgcaagccgctgatagagtatcaattgacgttaaggtgactctggaagctgcagcttgtactccaatactaagcaacggcggagttgttaacttcggtagtcattcagtcaatagactttcaacgcagcactacacacagattggaacacgtaatattaatatgactataacttgcgaatccgctaccggcattgcgattaccgctcgtgatacacgaatggatagtatgaccaccggaaaagatagtgggggtcagagtggtgtaaaatataccttaaatggcggaggttatattagccagacaacgcgcttattcggcttagggaaaacaaaagataataaaaatatcggtagttatgccgtgttaattgatagcaacaacattagtgccagcaatggtagccagacgttagctgtatcaatagcaggtgcagatgccgtcataacagggcaaaaaagagcatggcaaacgctcaccgcttatccgcttgcagtcgatcaaagctattattacacctttgtaaaaccaggtgaaacaaccccaactcctgtaacgaacgccattataccgcttcaggtgagcgcatctatcgcgaatgatttaggcggttcagaaaaaatcgaacttgatgggaaagctgtgataagcgtagtctacttgtgataacaatgccggacaggagtactatcaggcattcgttttatacgatcggttaatgtttcaggaaagctcttcgcatatcttggggaaagtaaatgtaatacgctgttcttaattgttcagtgctcaccccccagagtatagctcattccattattcaacttagctccatataaagggacagataatggaatcgctctcagaaggaaccacagcaggctaccagcaaatccacgacggtattattcatctggtcgatagcgcccggacggaaacggtacgtagcgttaacgcgttaatgaccgcgacgtaccaggaaattggccgacgaattgtcgaatttgaacaaggtggcgaggccagggctgcgtatggtgcgcagctaatcaagcgactatcaaaggatttatgtctaaggtataagcgtgggttctctgcaaaaaacttacgccaaatgaggcttttttacctcttttttcaacatgttgaaattcgccagacaatgtctggcgaattaacaccattgggaattccgcagacaccgtctgcagaattcccatcggcaaagatttggcagacgctgtctgccaaatctttccccttgcccaggtccacctacgtccgtttactttccgttaaaaacgctgacgcccgcagcttttatgaaaaagagacgctccgctgtggctggtctgttcgccagctagagcggcaaattgcgacccagttttatgagcggacactactgtcacatgacaaatcagccatgctgcaacaacacgctcctgccgagacgcatattcttccgcaacaggcgatacgcgatccctttgtgctcgaatttctggaattgaaagatgaatattcagaatccgattttgaggaggcgctgatcaaccacctgatggatttcatgctggaacttggggatgattttgcctttgttggtcggcagcgaaggttacgcattgatgacaactggtttcgtgtcgatctgctgtttttccaccgccgtttacgctgcctgctaatcgtcgatctaaaagtgggcaaattcagctatagcgatgccggacagatgaatatgtatctcaactacgccaaagagcactggacgctaccggatgaaaatccgcccatcggtctggttctctgtgcagagaaaggagccggagaagcgcattatgctctggcaggtttgcctaacaccgttctggcaagcgaatataagatgcaactacctgatgagaaacgactcgcagatgaactcgttcgaacacaggcggtgctagaggaaggctatagacgccgttaatttcagcggtttcgaattctgcagacagtgtctgcagaatctttaaaacgaactaagttttaagccattaaatcagccttaaccttcaccacaacctttttaatctctccaggctcgccgacaacgcatcctggtttatgcggttcacctggcataaacacggcgaacattcccggttttaagatgatggcttgctcgttatcaatggtgctgcaaagctgataatcatcctcatggtggaactcttcacactgacgcgcagtgcctgccatgccaaacagaatccgttcctcaccgtttaataacagctggatatcaatgtattgctcgtgcaattccgcttttttctcgacgggcgattgagtgttaaacgtcatgacattcataaagatattgtcgccctgtaattcgtaacgacccggcgctttttcttgcggtctggcagctaatgccagcgttaacgcgtcctgtaacgcaggatgtaacccagcagacggtaatgactgtacttcacccatcatcataatttttctccctgggccaacagcgcagccccaagtaaacctgcatcatggcggtaatgcgccgccagtaaatcaacatgaaatgccgctggctcctgcgccagatacgtttccaccagcgccagatacccttctgccagaccaacgctgccaccgaccaccacgcactggcaatcagttgtggctttaatatcagcgatcagccttgcaagcgtacgtgcggagcggtgaatcagctgctgcgcctgctcgtcaccctgcccggcgcgcgtgaaaatagttttcgcatccgcgccagccaactccccctgcgctgccgctgcaatgccgcgaccagaagcaatcgcttccacgcaacctgtgcgtccacagccgcagactgggccgtgtggatcggcaagcgtatgcccgatatgccccgccagaccgccagggccggtaagcagtttgcagccgctcactacaccgccgccaacgccggtggaaacggtgataaagaccatatcggttatatcgccatccagcgcctgaaactccgcccatgctgcggcctgcgcgtcgttaatggcaatggtcggcaaattggtaagttgttccagcgttttgactaacggaaagtgtagcaatccaccaagattatgcggattaagcgccagcaagctgccgtcacggattatcccggtcgaagcgatggcaacccgctgcgcatgagcttgcaacggagagactaatgcggataaggcatcacgcaaggcttctggtgtctggctggctggcgtaggaagttcacgacgatcgcggatctgcccgtcagcgccaatcagcgcggcggcaagtttagtaccgccgatatcaatcgccagtgtggtcatagcaccgcctttttcatcgctgtgttgtaccactgacaaatgtgctcaagacgcgtgattgcagaaccgaccgtcaccgcccacgcgccgtggcgcatcgcatccgccgcctgagcaggcgtgttgtaacgcccttcggcaatcacccgacatccggcgtcgctcaacgttttcaccagcgccagatccggctcttctggcgtttcaggcgtggtatagccagaaagcgtagtgccaataatttcggctcccagcttttggcatgccaggccgtcttccggcgttgagcagtcggtcatcgccagtaaaccgtgatggtgaatacgtgccagcagcgtttcaacaggcaccggacgcgggcggtcggtgccgtcaatggcgataatgtccgcgcccgcctgcgccagcgcatcaacatcttcaatataggccgtgatgcgtaccggagaatcctccagatcgcgtttcacaattccaataatcggcacgctcaccaccgcacgcgtggcttgcagatttgccacaccttcaatgcgaatggcaaccgcgcccgcctgttctgccgctaatgccatggcggcgacgatttcgggtttatcgagcgggctgtccggaaccggctggcaggagacaatcaggccaccgttagcagcgattttttgatccagttgtgcaagtaacgacatacatcttcccttagcgaaaggcccggtacatagaccgggcaacaggattaacttttggttttgactaaatcgtttttggcgctgccaaacggcacggcaccgctgaatggtttaccgtcgatagcgtcatgagtacgcaacgcttccgggcgcaaccaacgctgaacgcgagaaggcatatccagcccaatcagcaggatcaccacgaacgtcagactgaacgagagcgatgccagcgcagtacccagatccagacgttgagcgatcaacgcgccgatgattggggccagtgcaccgcccaatgcgccaacgttgtaggtaaagcccaggcccgctgcacgctggtcggtatcgaaataaccgccaatcagttttggtaagatcccggcgatcccttgtccaagcatttgctggaagaacagtaacagaccgagcacccagacgtttgcgccgccaatcgcaaataccggaataatcagcagctgcgaggccagcaggctacaaacgtacgctttgcgggttcccagccagtcaccgaggaagccacctacgcagcatcccaccgccgcgccaaagccactaaagaacagcacattggctacagtatgcgggttataagccagatcggttttcagatacgttggcagcagcgcctgaatcggccatgagtagaggaaagcaaacaacacgaccaccatcagcattacgcccgttggccagcgtttgcctgtactctgcaccataaagctgataaagattgcggcgcataacagcccaagaacagcgacgatcgcggcattttgcaggttaccggcgaagcagaaccacagcgcagtagccgccgccagtgtcattacgatattggcaatgcgatgttcaccacggtagagaatatccaccattgtgcgtactggtgctttacctgcgtgtttctctttccagtcttccgcttccgggatgtttttacgcagccagagagcaaagatgattggcaaaatgccgataaagaacagcgcacgccagccccagaccggaaccaccaggctatagacctgagcggcaacgacggcccccacagagaagcctgaaatcaaaaaaccactggctttgttacgcagatgttttggccagctttcaatgacataggtggcgctggaaccgtattcacccgccatccccatgccgatgaccagacgagcgataaacatggtgatgtagcctggcgcaaagccgcaggccagcgtcccggccgagaagagaacgatgctggtgaccattgccagacgacgcccgtagcggtcacccatagcgccgagcatcaggccgccgaaccagcgagagataaaggctgcagagatcagacttgccgcctgcaccgtcgtcagcccgaattcaccttgtacttcggtgagtaccagggcgattaaaacgaaatcaaaaccgtcaagcagatatcccaaccaggcagcggaaaatgcgcgccattgtgcacggttgagatggcgataccacgggatattctgggttgtagtactcattgtgagtctcccgcggtgggcgatgcccacacgctttggtatgaaaattgtagggtacagatgcgtttatttcccctcacccggtaggggcgagcgaggggaaacaactcacccgcgctcttgcatcaactgctgggccagcgccttcagttctggcagatatttttcatctaccggtccaaacggtttgcggcacagcggcacagaaacgacatccatataatggaggacagttttcaggccgcggaatacgcccgttttgatcagtaaatcaatgactttattgcattcagtttgcagtttctgcgcggtctggatatcgccttctttcagcgccttaacgatcccctgatagcgccagcccatgatgttgtaggtactgccgataccaccatcagcgcccgccagcagaccagaggcgaagatttcgtcgtaaccgttatagagcacaagatcaggatgttcacgacggatctgctccatctgatagagatcgccagaggtctgtttcagcgcacctacgccaggcaatgtaacaagtgtgttgatctgatccagggtcagttttaccccactcagggctggaatgttgtacaccaccatcggcaaaccatccgccgaatcaataattgcccgatagtgatcgcagtgttcttcaaagctgaaaggatagtagaacggcgtgacggcggagacggcatcgaagccataacgtttagccgatgccgcaagttgttggctttcggcggtgctgacgcaaccgacgtgggcgatgagtttaatcttacctttcgcctcttcggcgacgatttccagtacctgttcacgctcggaaaggctttgtacaaaggcctcgccggtcgaaccacccacgtataaaccgtcgatgccctgctgaatattgaactgaaccaggcgacgcagactcgctttatccagtgcttgttgttggtcaaaaggagtcaggagtgcagccattacgccacgtaaattcgttgccataaatacctctgaagtgatgcttgtctgataaacgatatacctttatacctgttataccagatcaattaagcaacaccccatacagaaagcttataatgcgatctgcttcactaaagtggcattatttctttttgttggtggtctgaccgaaagcgtgccaggtagcagagacgctgttgagatgcgattgcaacgcacgatcggcttcgtcaggatcatgacggcggatcgcatcaacgatcgcaatatgctgttgataactaacgttgttatgttcgtgcagtgcctgatcggtaaccgttgggcgtgcggcaataagccagtcgagcagggcaacgtggatcgccatgaagattgggttaccggggatctccgccagcacgcggtggaaatcaacgtctgaacgaatgaatgccgcgttgttatccagcgactgactgttgatttccagtgcttttgccagcaaatcgatttgctcatcggtggcatgttcagccgcatagcgcaccagactggattcaaagaacagacgtaattgttcgaaatgggcaatcccaccgggatgagaaaggaaatctttcgccatgccggaaagctcaccgatgatagtgtccgcagaaggacgcgagacgcgagcgcgttcgccgttgtttatttgcaccagacctttgcgttttaacgctgccagcgcttcacgcaccgaaggacgcccgacgttaaagaacgccatcagttcgcgttcagacggtaattgttcaccttcgccaaattcacgacggcggatcatctgttccagctcttcttccaccatttcggagagttttttacgcgccagcgggcggctacgcaagttgcgaccaattgcaggtgaagaatcttcggtttgcgaatcaaatgcgttcataaggcccattctgtaaggtcagtgtgattaacatcatcagtgacatcctatcacaggattgaaagtaggggaaaatggcagggttttctctttgtgcctcatcattaccataattaacggaataattaactattgcgaaaaattaatgtaacgcagataaaaacatcccgtttgaattatttataagactattcacgagcattatgaatattatgaatgtgttcttacaaaataatcataagcgcatattttttaatgaaaaatcacctcacctacaattaaaaacacgacatccgcaccataaatagccttgcaaaaaatataacatcgttgttttcaatctgccgtttatgggattgaccgttttcttttgacacggagttcaacaatgttcggcataattatatctgtcatcgtattaattacgatgggctatttgatcctgaaaaactacaaacctcaggtggtgctggctgccgcaggtatcttcctgatgatgtgcggtgtctggttagggttcggtggtgtactcgatcccaccaaaagcagcggctacttgatcgtcgatatttataatgaaatcctgcgcatgctgtccaaccgcattgccggattggggctgtcgattatggcggtgggcggttatgcccgctacatggagcgcataggggccagtcgcgcgatggtgagcttgttaagccgcccgttaaaactcattcgctcgccgtatattattctgtcggcaacttacgtcatcggccaaatcatggcgcagtttattaccagcgcctccggtctgggtatgttgctgatggtcaccttatttccgacgctggtgagtctgggagtaagtcgtctctctgcggtggcagttatcgcaaccacgatgtccattgagtgggggattctggaaacgaactccatttttgctgcccaggtagcgggaatgaaaattgccacatacttcttccactaccagcttccggtcgcctcttgcgtcattatctcggtggcgatctcccactttttcgtgcaacgcgcttttgacaaaaaagataaaaaatatcaatcacgaacaggcagagcaaaaagctctcgataatgtcccgccgctctattacgccattttacctgtgatgccgttaatcctgatgctcggctcgctgttcctcgcccacgtcgggctgatgcagtcagaactgcatctggtggtggtgatgttactgagtttgactgtgacgatgtttgttgagttcttccgcaagcataacttgcgcgaaacaatggacgatgtgcaggcgttttttgacggcatgggtacgcagtttgccaacgtggtaacgctggtggtcgcgggtgaaatatttgcgaaaggcttaacgacgattggcactgtcgatgcggttatcaggggggcggagcattctggtctgggcggtattggcgtgatgattattatggcgctggtcattgccatttgtgccattgtgatgggctctggcaatgcgccgtttatgtcatttgccagtcttattccgaatatcgcagccggactacatgtaccagcggttgtaatgattatgccgatgcattttgccacgacgctagcgcgcgcggtttcgccgattactgcggtggtggtcgttacgtcaggaattgcaggcgtttcgccttttgcggtggtgaagcggacagcgatccccatggcagtcggtttcgtggtgaatatgattgccacaatcacgctattttattaagtcattaaaaagacaaaacaggccgcctgggcctgttttgtattacttcacaacgcgtaatgccggtcgaccaccgcgtggtggctgcggaggttcatcgtcaggatgagtgtcatcatcgtgatctggcttgtcgccatcaataaccgacataacggtttcgttgtctgccgatgcctcttcatcattcatgatgctggtatcttcatcgtaggcagcttcaggctcaaacatcgtgcctgcgccattttcacgggcgtagatagccagcacggcagccagcggcacagaaacctgacgcggaatgccaccaaagcgcgcgttaaagcgcacctcatcattcgccagttccagattgccgacagcacgcggcgcaatgttgagtacgatttgcccgtcacgcgcatattccataggaacctgcacgccagggagcgtcacatccaccaccaggtgcggcgtgagctggttatccagcaaccactcatagaatgcacgcagcagatagggacgacgtggtgttagctgtgacaaatccatacagattaactccggcccagacgcatttcacgttctgcttcagttaaagaagcaaggaaagagtcacgctcaaagacgcgggtcatatagcctttcagctctttcgcacccgggccgctgaactcgatgcccagttgcggcagacgccacagcagcggagcaagatagcaatcgaccaggctgaactcatcgctcaggaagtacggcttctgaccgaagaccggcgcaatcgccagcagttcttcgcgcagttgcttacgtgcggcatctgcttcagaagctgaaccgttgatgatggtgttcatcagcgtgtaccagtctttttcgatgcgatgcatgtacagacggctttcaccgcgagctaccgggtaaacaggcatcagtggcggatgcgggaaacgctcatccagatattccataatgatgcgagattcccacagggtcagctcacgatccaccagggtcggaacgctctgattcgggttgaggtcaatcagatcctgaggcggattgtccttttccacgtgttcgatctcgaaacttacacctttctcagccagcacaatgcggacctgatggctatagatgtcagtaggaccggaaaacagcgtcattaccgaacgtttgttggcagcgacagccatgaaaacctccaggtatagtcagaatttttactgctaccagccaccaggtggccagtcagaagttgtgttacccaataaggaacgactctctttgttcgaaaatcaaacaaaaaatgagcaatacccgacatttgggcagaaaattggatgatagtttaccagattttgcgaccattgtggtgagtcgatgccggaaatggggaaaaagagatgcgctttagtctgaaatagttgacttagtcccttattggcgatgtggtttttgttttacctgtctgtcaggtggcagcaaaaagcaactttccagtttttacgctgattcagattttagctataaaaaaacccgccgaagcgggttttttcgaaaattgttttctgccggagcagaagccaattaacgtttggagaactgcggacgacgacgtgctttacgcagaccgactttcttacgttcaacctgacgagcgtcacgagtaacgaagccagctttacgcagttcagaacgcagggactcgtcgtattccatcagagcgcgggtgataccgtgacggatcgcaccagcctgaccagagataccaccacctttaacggtgatgtacaggtccagtttctcaaccatgtcgaccagttccagcggctgacgaactaccatgcgggcagtttcacgaccgaagtactgttccagagaacgttggttgattacgattttaccgttgcccggtttgatgaaaacgcgagctgcggaacttttgcggcgaccagtgccgtagtattgattttcagccattgcctataatcccgattagatgtcaagaacttgcggttgctgtgccgcgtggttgtgctcgttacccgcgtaaactttcagtttacggaacatagcacgacccagcgggccttttggcaacatgcctttaaccgcgatttcaatcacacgctcaggacggcgagcaatcatctcttcaaaggtcgcttgtttgataccaccgatgtggccggtgtggtgatagtacactttgtcagtacgcttgttgccggttacagcaactttgtcagcgttcagaacgatgatgtaatcaccggtatctacgtgcggagtgtattccgctttgtgcttaccgcgcaggcgacgagccagttcagtagccagacggcccagagttttaccggtcgcgtcaacaacataccagtcgcgttttacggtttctggtttagctgtaaaagttttcattaaaagcttacccaataaatagttacacgttggtgaacacccaaacgtcttcaattgttgaggttcacacgacaaagtccggcaaacctaccccttcgaatagcctatgccagcacacaaaaagttttgggaaaaaaactttcttgtaacgtggggtcgcaggattatagagaagtcggggtcaaagatcgacccctttttgtgatttgtgacaggttttaacccgccaaatgctcgcgcttcagatactcttcgctttgcatctcttgcagacgtgacaggcaacgctggaactcaaacttcagccgatcgccctgataaatttcatacagcggcacttctgcactcaccactaatttgacatggcgctcgtaaaactcatccaccagcgcaataaagcgccgcgcttcgctctccatcaaccgcgtcataactggtacatcaaacaacatgaccgtatgaaagagacgtgagagcgcaatatagtcatgctgactgcgggcgtcgacgcacagcgtagtaaaagagaccgccagcgtctggttctcgacgcccattgttgctaatggccgatggttgatttctaacgtcggtgaattttctcgtttcccccccgccagcgccaaccatagtttatccatttgcgcccgggtttcatcgtgaagtggcgaaagccacagatgcgcctgagtgagtgtacgcagacgataatcaacaccagcgtccacgttcattacatcacaatgctgtttaatggcatcgattgcaggcagaaaacgcgcacgttgcaggccatttcgataaagttcatccggcggaatatttgacgtcgctaccagggtaataccgcgagcgaacagggctttcatcagaccgccaagtagcatggcatcggtaatatcagaaacaaaaaattcgtcaaaacagagcacgtcagtttcggctttaaagcgatcggcaataatttccagcggatcggtctgcccctgtaaggcagttagctcttcatgcacccgcagcataaaacggtgaaagtgcaggcgctgtttccgctctcccggcaggctttgatagaaaaggtccatcagccaggttttcccgcgtcctacaccgccccacatatataagccacgcactggcgtatgctttgtgtcttcgcgtttaccccacagcttaccgacccgcgccattagcccactcgtcctgggggctggtggcgtgctattgatgagttcctgataaataatttccaggcggctgacggcctctttttgaacgtcgtcgggttgatggctgccttcattaagcgccttcaggtattgcgatgttggggtaacgctttgcatgatcttattgttattccttgaataatcggtacgccgttgttcacggttgacgaaaaaaaggccgttctacactacgcgatatgcagtcgggattccacttctgtggaattaacggttatagtggcataatcagccgcaggcatggagcctgaagccaacaccctacggaaacaaaagacaacgggagatgttcatgacctgggaatatgcgctaattgggttagtcgtcggcatcattattggtgctgtggccatgcgttttggtaatcgtaaactacgccagcaacaggcgttgcagtacgaactggaaaagaataaagctgaactggacgagtatcgcgaagagctggttagccactttgcccgcagcgcggaattactggataccatggcgcacgactatcgccagctgtatcagcacatggcaaaaagctccagcagcctgctgccggaactgtctgctgaagcaaacccgttccgtaatcgtctggcagagtctgaagccagcaacgatcaggcaccggtgcagatgcctcgcgactattctgaaggcgcatccggcctgctgcgtactggcgcgaagcgcgactaatttatttttcgggcgcagccattgcgccctcctcttctctccctccccgactatcatttaatctggtgtctcattgttagccgtctgaaaattcaataacatcaaactgttttgaatctcttttcttatcattcaggtacgagagcaggaataatgaaaaaacaaacccagctgttgagtgcattagcgttaagtgtcgggttaactctctcggcgtcatttcaggccgtcgcgtcgattccaggccaggttgccgatcaggcccctctccccagtctggctccaatgctggaaaaagtgcttccggcagtggtgagcgtacgggtggaaggaacggccagtcagggacagaaaatcccggaagaattcaaaaagttttttggtgatgatttaccggatcaacctgcacaacccttcgaaggtttaggctccggtgtcatcatcaacgccagtaaaggctatgtgctgaccaacaaccatgtgattaatcaggcacagaaaatcagtattcagctcaatgatgggcgcgagtttgatgcaaaactgattggtagcgatgaccagagcgatatcgccctgttacaaattcaaaacccgagcaaattaacgcaaatcgctattgccgactccgataaattgcgcgtcggtgattttgccgtagcggtcggtaacccatttggccttgggcaaaccgccacctctggcattgtttccgcattaggccgcagcgggttgaatcttgaaggtctggaaaactttatccagacagatgcttccattaaccgcggtaactccggcggtgcactattaaaccttaacggtgagttaattggcatcaacactgcaatccttgcgcctggcggcgggagcgtcgggattggatttgccatccccagtaatatggcgcgaacactggcgcagcagcttatcgactttggtgaaatcaaacgcggtttgttaggcatcaaaggcaccgagatgagtgccgatatcgccaaagccttcaaccttgacgtgcagcgtggcgcgtttgtcagcgaagtgttgccaggttctggctcggcaaaagcgggcgtcaaagcgggcgatattattaccagcctcaacggcaaaccgctgaatagctttgctgagttgcgctctcgtatcgcgaccaccgagccgggcacgaaagtgaagcttggcctgctgcgtaacggcaaaccactggaagtagaagtgacgctcgataccagcacctcttcgtcggccagcgctgaaatgatcacgccagcgctggaaggtgcaacgttgagcgatggtcagctaaaagatggcggcaaaggtattaaaatcgatgaagttgtcaaaggaagcccagctgctcaggctggcttgcaaaaagacgatgtgatcattggcgtcaaccgcgatcgggtgaactcgattgctgaaatgcgtaaagtgctggcggcaaaaccggccatcatcgccctgcaaattgtacgcggcaatgaaagcatctatctgctgatgcgttaatgtcgtaaaccgggcatcaggcttacgtgtgatgtccggttaactcgtggtatgctgctgccgttcccttttttaatgacgcctccatcatgtttgtgaagctcttacgttccgttgcgattggattaattgtcggcgctattctgctggttgccatgccttcgctgcgcagccttaacccgctttccactccgcaatttgacagtaccgatgagacgcctgccagctataatctggcggttcgccgcgccgcgccagcggtggttaacgtttacaaccgtggtttgaacaccaactctcacaaccagcttgagatccgcaccctgggatccggtgtaatcatggatcaacgcggttatatcatcaccaataaacacgtcatcaacgacgccgatcagatcatcgtcgccttacaggatggacgtgtatttgaagcattgctggtgggatctgactctctaaccgatctggcggtacttaaaattaatgccactggcggtttacctaccattccaattaatgcacgtcgcgtaccgcacattggcgacgtagtactggcgatcggtaacccgtacaacctcgggcagaccattacccaggggattattagtgccacgggtcgaatcggtctgaacccgaccgggcggcaaaacttcctccaaaccgatgcttccattaaccacggtaactctggcggcgcgctggtgaactcgctgggcgaactgatgggcattaatacgctgtcgtttgataagagtaacgatggcgaaacgccggaaggtatcggctttgcgattcctttccagttagcaaccaaaattatggataagctgatccgcgatggtcgcgtgatccgcggctacattggtatcggcggacgtgagatcgcaccactgcacgcgcagggcggtggtatagatcaactgcaagggatcgtggttaatgaagtgtcacctgacggcccggcggcgaatgcgggtattcaggtcaacgatctgattatttcggtggataacaaaccggccatctctgctctggagacgatggatcaggtggcggaaattcgccctggttcggtgatccctgtagtagtgatgcgtgatgataagcagttaacgctgcaggtcaccattcaggaatatccggcaaccaattaagtcgtgcgctcaaaacaaaaaaccggagtctgtgctccggttttttattatccgctaatcaattacttattaacgaactcttcgcccagggcgatatctttcttcagcgtatccagcataccttccagcgcgttctgttcaaatgcgctcagggtaccgatagatttacgctcttccacgccgtttttacccagcagcagcggttgagagaagaaacgggcgtactgaccgtcgccttcaacgtaggcacattcgacaacgccttgttcgccctgcagtgcacgaaccagagacagaccaaaacgtgcagctgcctggcccatagacagggttgcagacccgccaccggccttcgcttcaaccacttcagtacccgcgttctggatgcgtttggtcagatcagccacttcctgctcggtaaaactaacgccaggaacctgtgacagcagcggcagaatggtaacaccagagtgaccgccaataaccggcacttcaacttcgcctggctgtttgcctttcagttccgcaacaaaggtgttggaacgaatgatatccagcgtggtaacgccgaacagtttgtttttgtcataaacaccggcttttttcagcacttcagcagcaattgcaactgtggtgttaaccgggttagtgataataccaatgcacgctttcgggcaggttttcgcaacttgctgtaccaggtttttcacgatgccggcgttaacgttaaacaggtcggaacgatccatacccggtttacgcgctacgcctgcagagataagaacgacatctgcgccttccagcgccggagtcgcatcttcaccagaaaaacctttgattttcacagcagtagggatatggctcagatcgacagccacaccgggagtcactggagcgatatcatacagagagagttctgaacctgaaggcagttgggtttttaacagtagtgcaagcgcctggccaataccgccagcagcgccgaggactgcgactttcatcctaaactccttattatattgataaactaagatatgttgctccgctgccgcgaccttaatccacaaaattgccgtttacaatgaccacatctcaagaatgtgtagtcacgcaagtttagcgtttatgcatttaattgccgtaatcaggaacctaacttacgtaattaacagtcgcttatgcattagcgcaacattccaacaggtggtgacaatataccctaccgttcagccaaaacaacatcaatttgataacaattaatttacttttaagcagaatttgcatgccgtgacgcaggcatgtttctcaataacgaaatttgataaaatcccgctctttcataacattatttcagccttcttcagggctgactgtttgcataaaaattcatctgtatgcacaataatgttgtatcaaccaccatatcgggtgacttatgcgaagctcggctaagcaagaagaactagttaaagcatttaaagcattacttaaagaagagaaatttagctcccagggcgaaatcgtcgccgcgttgcaggagcaaggctttgacaatattaatcagtctaaagtctcgcggatgttgaccaagtttggtgctgtacgtacacgcaatgccaaaatggaaatggtttactgcctgccagctgaactgggtgtaccaaccacctccagtccattgaagaatctggtgctggatatcgactacaacgatgcagttgtcgtgattcataccagccctggcgcggcgcagttaattgctcgcctgctggactcactgggcaaagcagaaggtattctgggcaccatcgctggcgatgacaccatctttaccacccctgctaacggtttcacagtcaaagacctgtacgaagcgattttagagctgttcgaccaggagctttaatctctgccccgtcgtttctgacggcggggaaaatgttgcttatccctctcaaccccctgctttcccctgcgattaatttaacgaatagtgcgttttactgcgacatgtcattcacacaatgaatacataaggtaaaaaaagcacattatgcaaaattcattatctaattgaaaaaactagaattaacgataaataaccgtatttttaattcttttttgttattaaaattcacatttttaacacttagtatcaactgaaacagttagcgcggtattaattagctcaataattagtgtatacttgattttgtgatatgggtcacgaaacaaaggcccagctaaaagattatgtcgaggtaaaaatcatgaaaatcaaaaccactgttgctgcattaagcgtactttctgttctctctttcggtgcattcgctgccgactccattgatgctgcacaagcacaaaatcgtgaagcaatcgggaccgtatccgtaagtggtgtggcgtcttcgccaatggatatgcgtgaaatgctgaacaaaaaagcggaagagaaaggcgcaacggcctaccagattactgaagctcgtagcggtgacacctggcacgctacggctgaactgtacaaataaaccctcatcgtcttgtccgacgatattgcccccggttcgggggcttttttttgcgctaatgacgaacattaaaacgcaaatgcccttccagctcttcctctgcctcatcaaacagcaatattaacgcgccaaaacggcgacgcgttttctctcccagatgaacaaattcaatctcaagtggtagcggcaggacatcgttcattaacacatcccatagtgagtcgagatcgcgtaccttatctttcgccagaccaaaggtttggctaaagtcacgataaaaatcctcctgactctcaatctcatcaaaatcaaaggtataaatattcatctgttgccaccgtcacgtttcgcggcgagttctgccgtgcatcgctaagtatagccatgaaaaaaccgacgcttttggcgtcggttttgacttaactatcggtcaacgcatgttgatacttatggagcatccccgccagccgatttaccggttccgtcacctgcggtggcgcttgccagatgcgtagcttttcctggtagatttccagttcttccagcaactggccaaagtaccgacgacgtttatcatcgctacgggcagatatcacatggtctgctgtgcggcgcatttgtcggtgaaacgccgataaatcctcgttaaccgggatcggtgcatcacgcaggcgctggtgcgcgataatcatcgtcagcgccaggcgaaatttcggcaaatcccctgggaacttattcatcagcaaaaacagctgctgataaagtgccgggaggtggttctctttacgacgtgccacattggtagtcatcgcggaaacagcggcagaaacaaactgattaagcagtacacgtccggtcctgtcgcgcgatttatcccgcaccagcaaaataacggtgaacgcgagcacacagccgacgatttgccctaatgcgctgtcgagaaactgactgaaatggaaagtcatcgggttatccagcacgataatatttatggtgctggccagtgcccccatcgagcccagtcgccgtttctgtacttctataccgaggaagaatcccagcactgccaggctaatgcacagcagcaacatgctctgttgggtattagggataatcaccaaaaagtagagcagccctaacggcagcgcggccagcgtcccgtagataaagtcgatcgccaccatgcgtggattcggcaaacgcattgccagtgacgtcactaccgcaatcatcaccattgcaccactgccggaagtccagcccgtccacagccagaaaagcgtgcccagaatgcaggaaagtgtggttcgccagaagttaaccattgcatgatgacgttcggctgactctacttttacttccggttcgccttgcaggatctcttcttcggtggcgttgatttttgtgttactgataacgccgcgcttgagaagctgataacgcgttgccgccgcgacccagctataaatggtgacaggcgtttcccgttccccggtccaggcgataactctccgcaggcgtttgagctgcttgtggacgtcctgcgcggtttctaccggcgtgtcaaaaaattcgcggaaagtatcagtgatcaattccgggcgcgtattctgaataagataagtttcgcaggattgggtaatcagcgtcagcgatagcgtattgatcgcttttaaacgtcgattggcccgcgcccagcgggaagattccatattcaggttgctgcgcatgccttgtagcgccgtggtgcgtcgcaccaggtcgccccaggctttatcgacaacttcaccatcgccatgcttgatacagagttgcattaattgatattgcgcgaccagcaaactttccagctctcgatccacttcttgtttgatcgatcgcggagaaaagagcaaatccgccataatcgcacacacaataccgataacgatctcgctacaacgttcgacggcaaactgcggcgtaagcaatggttccggctgaatggtgatcacaatgatcagcgcggtataaccggccagcccccacgcatacgagttttctattcgtaccagcgaggatatccaggtacaaaaaccggcccagatacagcacaccagaatcatcaataatggtgcgcggatcatcgcaatgatgatcaccagtccggcaatacagccaataaatgtgccgatgatgcgcaaaaagccacgatagcgaatagcgccagaatacggttcacctcccgcagcaaaggccggaccggcggcaacaatcgccgctgtcagtaccgcccagcgtggcgtttccagctggaagtgaaagccaacaaacagcgccagtacaatggcggtcgccagttttaccgcaaagcgaatatgttggttagcaatggagaaaatacccatcgtgattaaccaaactcacgcaggcgatgggccattttacggaagaacgaatcctggctttcgtcgcgatcttgtttgccagtgaccaccactgtagcagtggtgcccgcaggccagatgttctcttgctggttgtcgagacgaatacgaaccggaacacgttgcgcaagacgcacccattcaaggttagagtctatagtcgccatccctttgtcgtcacgcgtgctgctggcgttggtgacccctgcggcaacactatcaacagtccctttcagcactttgttactgccaagcggcgtgatctctgcacgataccccggacgcaccccttccagcttagtttcttccatataggccagtacatagaaggagttctgtttcaccagcgcaaccgccgttgatcctcgagtaataaactcaccggtatagacgttgaggttggtcacccagccatctgctggcgcgcggatcaccgtgcgttcaagatccagttttgccagatcgcgggtcgcctgcgctttcgctaactgatgcagaaccgtttgtagtacgttgttggcctggtcgatctcttcgcgagacatcgcctgcacaccgagacggttacgacgtccggcctcctggcgtttctcctgtgccagtacctgataataagcaacatcggcttgcgcttcctcaagcgccttttgatagcgcggctggtcgatggtgaacagtatctgtccttttttcaccagctggttatcatgaacattcacctgggtaatgagtccagaaacgtccggcgcgatcgcaacgacgtcagcgctaaagcgcgcgtcacgcgtccagggggattcggtgtaatagacccaggcattaaaaattgcgatgaaggccagaatgactaatacgaccgtgatggccgtacgggagaattttcttattagtgttttcacttcaacctcaaacgaacagtcgcgatatcaaataaaacaagcagcaatagagcgcggtgttgaacaacgccggatgccagacaaagtcgtagatacctgttggcacaagtacccggcgcaccagccagaaaatcgccagtgataaaagcaattcaaaaaatatcggtgggaaggacagcccaaacaccacgataacgggaaacagactcatgttgaccttggttgtaaagagagagcaggcgttattattttcagcatctgtcgccgcagagaagggcatggaaagccgggcgagagcaacattgctgtagattgatatttaatatattagcgtaactgttatgctgttatctatattatgtgatctaaatcacttttaagtcagagtgaataatggaacgactaaaacgcatgtcggtgtttgccaaagtagttgaatttggctcttttaccgccgccgccagacagctacagatgagcgtttcgtccatcagtcagacggtatcaaaactggaagatgagttgcaggtaaagctgttaaaccgtagcacacgcagcattggcctgaccgaagccggtagaatttactaccagggctgccgtcgtatgcttcatgaagtgcaggatgttcatgagcaactgtatgccttcaataacacccccatcgggacgctacgcattggctgttcttcaactatggcacaaaatgttctcgccgggctgacagccaaaatgctgaaagaatacccaggtttgagcgtcaatctggttaccggaattccagcccccgacctgattgccgacggtctggatgtggtgatccgcgtcggcgcgttgcaggattccagcctgttttcccgccgtctgggcgcgatgccaatggtggtgtgcgccgcgaaaagctatctcacacaatacggcataccggaaaaacccgccgatttgagtagtcattcatggcttgaatacagcgtgcggcccgacaatgaatttgaactgatcgcaccggaagggatctcgactcgcctgatcccacaaggaagatttgtgactaatgatccgatgacgctggtgcgctggctgacggcgggtgccgggatcgcctacgtgccgctgatgtgggtgatcaacgagatcaatcgtggggagctggagatcctgctgccgcgttaccagtcagatccacgcccggtttatgcgttatataccgaaaaagataagctgccgctgaaggtacaggtcgtgatcaactcgctgacggattattttgttgaggtcggtaaattgtttcaggagatgcacgggcgcgggaaagagaagtaattcatattgtactgttacgttgtacaaacctgtgccaacgggttcccctcaccctaaccctcaccccaaaggggcgaggggaccgttcgtgcacgtagaaagattaattatccttctgaaaatagtgaaattattacgcagtaccgccaacagtcaggttatcgactttcaacgttggctggcccacgccaaccggcaaactttgcccttctttaccgcagacacccacgccgttatccagtttcaggtcgttgccaaccatcgaaatctgctgcatggtttcgataccggaaccaatcaacgttgcgcctttcaccggcttcgttactttaccgttttcaatcagatatgcttctgaagtggagaaaacgaatttgccggaggtgatatccacctgaccgccaccaaagttcggtgcatagataccgtactcaacggattcaataatttcctgcggggtcgatttacccggcagcatataggtgttggtcatacgcggcatgggcagatgggcgtaggattcacggcgaccgttgccagtcggcgtcatccccatcaaacgcgcgttgagtttatcctgcatgtagcctttcagaatgccgttctcaatcagcacgttgtactggcctggcgtaccttcgtcatcaatcgccaccgaacctcggcgatcgaccatcgtgccatcatcaaccacggtacacagttctgaagccaccagctccccgacctgtccactaaatactgaagtgccacggcggttgaagtcgccttccagaccgtgaccaaccgcttcatgcaacagcacgcccggccaacctgcgccaagtactaccggcatggtgcccgctggtgcagcaacggcagaaagattgaccagcgccatacgcactgcttcttttgcccatgcatccgcacggacttcgccgtcgagatcggcaaggaagaattcataaccaaaacgaccgccgccgccactggcaccgcgttcgcgtttgccatcttcttcgacgagaacgctcacggaaagacgcaccagcggacggacatccgccgctagcgtgccgtcggtggccgcaaccaaaattaattcatagacaccactgaggctggcagtcacttcctgtacgcgcttgtccgcttcgcgggcaaccttatcgacgcgacgcaggatatccagcttctcttcacggctcatgctttgcagcggatctaccgaggtatacaacgggctatgctctaccgcgcccagcgtctgtactttaccatcaccactatcacggacgatggtgcgcgccgcttgcgcactctgttccagcgccagcaggctgatttggtcagcgtaagcaaatccggttttttcaccgctgattgcacgcacaccaacgccctgatcgatgttgtaagaaccatctttaataatgcggtcttctaaaacccaggattcgtgatagctcgactgaaaatagagatcgccataatcaaggcgacgttcggccagttgaccgaggatcgcgaacaagtcctgatgtttcaggccgttcgccgctagcaattgttcacttaccaggttaagactcatcgtttttgctactcgttagttactgcagtagaggattttttacggctgccggatgcggcgtgaacgccctatccagcctacggttatgttccggtttgtaggcctgataagacgcacagcgtcgcatcaggcaacggctgtcggatgcggcgtaaacgccttatccgacctacggttatgttccgtttgtaggcctgataagacgcacagcgtcgcatcaggcaacggctgccggatgcggcgtaaacgccttatccgacctacggttatgttccgtttgtaggcctgataagacgcacagcgtcgcatcaggcaacggctgccggatgcggcgtgaacgccctatccgacctacggttatgttctggctcgttggcctttggcaacgattatcctatgagattggggcaattacgcgccctcgtcaaatcattgcgctttttctttacgcggttggcgcaacacttcgttgatttgcggatcgtccagcggacccgaaatgtgatagcgcaaaatggagactttgctccacagcggccccagcactttactggcggcaaacactgccgcgccaacaatggggttaaccgcaaaagccgcagccacgcccaccgtcgcagaaatctctggtgcgacaaccgcttccatattcaggtcgcgacgtaccagatttaccgaccctttcatggcgatatccgcctccaggccatccaccagcgtgtcgtcggtgtgcataacgccgtctttaatccacgcggtgctgcgaatggagtcaaaatagaacccttcgccaaaagtgtctctgaaatcaaaacgcagcttacgcatcagggcatctacgctcaataagcgcagcaattgcccggcatgtccggtattgatttcggtaatttcgcctttacccagttgagtatgaatgatgccattcaacgtcgcttcatctggctgccagggtgctttgcgccagtgtaaatcgtaatccacattaaatgacgactggcgtatgggcgtcgtgacaccaaaaaattctgcggcggcatcaattttctgcccgcgcagttttcctttcagcgaggtacgttcattccccggattattaacccattcaccatcggcagtaagccgcgagaaaccagtatcaatcagtccattggtcagcgttaacgtatcgccagaaatggtgatatcactgtcaatgcgaccgaatttttgcccccagaaccagcactctgtgcatcgtatttgggcgtccggccagccacggaagttaatgcgctccgttgtcgggaaaggtgatgacggcgttgaatcaccacgagttttcgccacgctcgggttgtaataaagatatttgatattcgccagccacggcgcgttattacgcatcgctagcgtggcgttgatttcacgcccttgcgcttcaaccagggtgccatttgccgtcggttgcgaaacaatactcaggttattccattgctgatttcccagtgacaacataggcgtacgtaacgttatgtgttgtgggaaactcgctgcaccaccgacactctccgcagcgcctttctggaacagggccagccactcggcaccattcatcggcggcatattgagttcaacgccactttgttccggcaacggcgggagcgttttactgtctgccgcccaaatagcacgatcgagcgtcagcttttgaccgagcaaccagcggctattgaaatgattatccgcaccagcctgtccggttaattcaaagctgttgagattgccatcaaccttaacgtttaccgctagtggttcacccgcaggtttggctaacggtgaaggtaagtgactgctcacattctttagatcgccgttcagctctatgttataggtcgcaccagcatgataaggcagatcaatgcccactttaccatcccacgccacgctgccactcaatgcttcgttcaccgcttcaggcagaacgccggttttcgccggttgccagttaccgttgaggtttaccgctacctggtaggcttttgccccttctttggtggaaaaatccacgttcaacggctgattaaaccagcttgctgtcagtggttcactttgcagatcgctattgataaagctgaatttaccgctcaaatttttcagggtgctgtcgagtggtttgataaacagactgttattacgcagcgtcacttcacctttcgcggttaccagttcgccgttcagcgggatatcaagatgtaagcgagcattcacatcgccgtcgagctggagttcttgcagggtcgcacccagagaatctttcagcggtgtctcatcaaagtaagggccaacggctttacccggacctttaatgtcagcgtcaatcagcagtttttcttttgagtagtcagggatcactgcggtaagaatactcgcgcgcacgccgcccagattaacgccatcggttttcatccataaaccgtcgttaataaagtccagttcaatatcaaggttagttaatgcaggccagtccggctggaaggcaaacttcgcgttgcgcagcggcaccagcacttcaaactgaccttcgttgtgtttataggggaagagttgcggattgccaccataaaccagcgtcgcgttatccgcttcaccgccctgaatcgcgccacttaagtaatcaaccaggtctttacccatcaagttttccgggaaatagcgccaggcttgtgaaccatcatcggtactgatgccagccagaatacccagccagggttcatcgttagcaggttgcaggtaacgaaaaccgccgcgcgcatggacggctttggctttaacgtcaatattacgcccatccagctggaaacctttgttattgttcagccagcttatagttgcctggccgtcggcgatttctagtggcgcacggaataccgtttcgtaaggcatctttgcctgcttcatcgacgcggtaagcaaaccattttcaacgctgccggaaagcgtcccggagaagtgttccgcacccggtaataatttccattgcttccaggccagatcgctccacgatgcctgaaaacgggtcttgtctgccgcctgaagcgggatatccagcgccagagtgttaatcttgccgctcggttgtgtggagcgccaaacatcacccagtgcaggtgaaagtttcgcggccagcgggcgtatgccctccaggcctgccagctccagattactggcgcgaatccggagttcgtcactgcgtttattgtctttgccgccaacgtcctgttccggtatccaggccagcgtcaatgctccgctcggccagggtttgccgtccatcgtgatccgtgtatcgggaatagagaactgccagcccggattttcacgcgtaatatgcgcggtcagattatccaccgacagcgtatgcgtttgcttctcgcccaaccagctggcaccgccctgtttcagccagacgtcaccgccggttacatcgcctttgtcgatcgtcatccagccttcaagggagaactgtgccgtttccagcgcaatattgtcctgcatccatttaccgagccacggcttcaggtcgatgtcatccgcctggagccagacgcgaccattgcttaacaacccctcatcatcgcgcaaatccatgcgcacctgcatcacgccgtgctgtccggtaaggctggagaggcttaccaggccttccgcacggtgtcgacgtggatcgttcagccaggtgagttgtgggatcgccagctcggcgcgctgaccggatggcgtcaggaaactgacttcactgtcgcgaagatcgaaatggtcaaattgacgaagaaacagatcgctgatgtgactggcttccagactgtcatcactaccaccgctggtgataggagtgttggtgcgaaagcgcagctgccagaaagtgaggtcgcgaaactgccagcgcatatgtaacaggctctgccagacatccagcgccagagtaacgcgtttaaccgaaaattcgccgccatcttttagttctgcacggatgtcgtgtgcttcaagcgtcgggccaaaattctgccagctggctgagagctgactggcttctaccggcatgccagtcgcggattctattttgttgaggatttccggacgccaggcgtcaagatgcggtaaagcaatacgcaggccgctaaccagcagggcagcgatcacaacgagcgcggctccagtaagcagtaaaatccccggcaatcgcctcacccgtcactccttgtctgctaaaaatgtgactcaaaaaccctttgccggatggcggcccagcatctgtttacatcattacgacgtcaaactgctcctggttatagagcggttcaatttgtactttaacctgtttgccaacgaaaatttccacttccgccagcgagtgtgactcttcgcctttcaaggcttcagctactgccggagaagcatagaccaggaaacggtcggagtcgtaagcatggtggacacgaacaatctcgcgcatgatttcatagcataccgtttccacggttttcaccgttccgcgaccgtggcaggttgggcattcgttacacagtacgtgctcaatgctttcgcgggtgcgtttacgcgtcatctccaccagccccagcgccgaaaaaccattaacgctggttttcacccggtctttgctcaacgcctgctccagcgagtgcagcactcggcggcggtgatcttcattattcatatcgatgaaatcaataatgataatcccgcccagattacgcaaccgtaactggcgagcgatagcctgcgtcgcttcaatattggtattgaaaatggtgtcgtccagattgcgatgaccgacaaacgctccggtattgatgtccacggtggtcatcgcttcggtctggtcgataatgagataaccaccggatttcagttctactttgcgttccagcgctcgctggatttcgttttcgacatcaaagagatcgaaaatcggctggcgtcctgtgtaatgctccagcttgcttgtcatctcgggaatgtactccgaggtgaactcaagtaacgcttcgtaagtcaggcgtgagtcaacgcgaatgcggtccagttcggcatcggcgaaatcacgcagaacacgctgcgccagcgccagttcgccgtacagctgataacgggtctgcgggcgttttttacgctccataactttggtccagacgcgtttcagataagcggcatcggaggccagttcagcctcgccaaccccttccgctgcggtacggatgataaacccgccctgctcgtcgcaatactctgcgaccacttttttcaggcgttcacgttctgattcgctttcaatacgttgggaaaccccaacgtgagaagcccctggcataaacaccagatagcgagaagggagcgtgatatcggtggtcaggcgcgcacctttagtgccaagcggatctttcaccacctgcaccatcagatcttgcccctgacgaaccagttccgagatgtcgcgcaccgtgaattgcttttgttcttcacccgccacacattcggtgtgcggcatgatgtcggatgcatgaagaaacgcggctttatccagcccaatatctacaaaagccgcctgcatacccggaagtacacgacttacacgacccttgtagatattgcctactattccgcgtcgcgcctcacgttcaatatgaatttcctgcagaataccgccatcaatatacgccactcgcgtttccgaaggcgttacgtttactaacaattcagccgtcatgtttatcccttttctcacgcagtgcgttaaaattacttaataattcatacgtttcaaccagcggtaagccgactacggcgtgatagctgccatttatcttcctgacaaaacagccacccagcccctgaataccgtatgcacctgctttatctaacggttcatcgctggcgacatagcccgcgatgtcttcgtctgttaacgttctgaaagtcacatcggtgaccaccaggcaatcgagaatgtgctggctgtcggccaacgccactgctgtcatcacctgatgggtctgacccgataatttgcgcaacatctgcgccgcatgctctgcgtcgcgcggtttctccagcacttctccgttcaggataacgatagtatccgcacccagcaccgggagatccttcgccgtttgcgcgacacctgcccgtgctttctcgcgcgccagacgcacaacatactgctgcgcgctctcctgcggctgacgctgctcctcaatgcccgtaacaatacgttcaaaggtcacgccaagttgcgcaagtaactcctgacgacgcggagaaccggaagctaaatacagagaagtcatagaaacctttattgcactgcaaactgctgacggactttgcgcatcagcaagaaaatccacggccagagcaccccattgactacactactccagaacacttccggtctgaaagagacgttaatcactaaaaactctgcccagaaaacaataatatccaccaccagcgaaagcaacatgacgaccagcgcctgctgccataatgcgaggttgcggaaaagctggtatttcagcgccaccaggtaagcaatgatgctcatcgccaatacgcgtacgccaagcgtcgagccgctgatcagatccagtatggcacccatcacaaaacctgtgcccacatttacgcgatgaggcaaggccaggatccaatacaacaagatgagtaacacccagtttggccggaaaacaatcaggttatccggccagggcatgatttgcagcaacagcgcaatgaggaaagagagccagattacccagcgtccctggctacgatagctcgccactattgccctcccggcgcacgcgcaggcggttgagcaccactttgcggcggcgtagccctttgtggagagcgattagcagcaggctgtgtcggcgcagcaggcgcagtagctgcatttcctgtcgccggttgctgcggagtcggctgagcgatccccgttgccggttcaggtaactttggccccatcgcgtctggcgaaggcaatacctgcggcatcatctgcatcagacgttcattagcaacacgatgcacctcttccggcgtcatcgggttagcgccgttacgatctgccccccacagcagcagcagataacgcaaacgttgcagccctgcagtcggacgcgcctgaatcacagtataagcgcgctgggtatcgagttttacggaagagacaaccgcgaccggatagccttccgggaaacgaccgcccagaccggaagtcaccagcacatcaccaacacgaatatccgtattcgccggcagatgctcaagctgcaaatcatccgtacaaccgttaccggctgcaattacgcggatatcgttgcgcagcacctggattggcagcgcgtgggtcgcatcacaaatcagcagcacgcgactggtcagtttagcgacggccaccacctgaccaacaacacctttgtcgctgatgaccggctggccttcataaacgccattaacgctacctttatcgataacaacttgatcgctataaggatcgttaaccgtggagataacctgagtcaccattttctgctcatcctgacgcagcggggaacccagcagctcgcgcagacgcgcgttctcctgtttgtattgtccaagcatcagcagttcactgtttttcagcaacagttcctgacgtaacgcccggttttcaagttctaattggtcacgcgaggccagcgtctgcgatacgccatccagcaattcacgaggagcattggaaacaaagtagaaaggactgacggcggtatccatataagtacggatttgactgaacgtccccaggcggctgtcggcaataataatgccgagcgccaccagcaccgccagaataaggcgaatctgtagcgacgggccacggctaaaaattggcttcataagttatgcgtattctcgtatcagaccaggcagggtaaacagacacttcccctgcctgcatccgattactcttcgctgaacaggtcgccgccgtgcatgtcgatcatttccagcgctttgccgccaccgcgcgccacacaggtcagcgggtcttcagcaacaacgactggaatgccggtttcttccattaacaaacggtcaaggttacgcagcagtgcgccaccaccggtgagcaccatgccgcgctcggagatgtcggaagccagttccggcgggcactgttccagtgcaaccattaccgcgctcacaataccggtcagcggttcctgcagtgcttcgaggatttcattggagttcagggtaaaaccgcgtggaacaccttctgccaggttacggccacgaacttcgatttcacggacttcatcgcccggataagccgaaccgatttcgtgcttgatacgttctgcggtggcttcaccgatcagagaaccgtaattacgacgcacatagttgatgatagcttcgtcgaaacggtcaccaccaatgcgcacagaagaggagtaaaccacaccgttcaaggagataacagcaacttcagtggtaccaccaccgatatcaaccaccatagaaccggtcgcttcagaaaccggcaggccagcaccaattgcggcagccatcggttcttcaatcaggaagacttcacgggcaccagcgccctgcgcggattcacgaattgcgcggcgttcaacctgggtcgcgccaaccggcacacaaaccagaacgcgcgggcttggacgcataaagctgttgctgtgcacttgtttgatgaagtgctggagcattttttcagtcacgaagaagtcggcgataacgccgtctttcattgggcgaatggcagcaatattgcccggcgtacggcccagcatctgcttcgcgtcatgacctactgcagctacgcttttcggtgaaccggcacgatcctgacgaatggccaccacggaaggctcattcaatacgatgccttgtccttttacataaatgagggtattcgcagtacccaggtcaatggacaagtcattggaaaacatgccacgaaattttttcaacatactaagggataatcctgaaagctggggcggaaaagaaaatccgcttactttaccaaccacacgcagcagcgacaaggcgcaaaaatcatctgctacggtgaaaattagtgcagttcgtttcctttgttacaaatctctgcctgagtccagaaaggcttaatgcatcagcagcattcctcgcctgtttgcaaccgcgtaaggtcattcatctgcatatgtgctgcaacaatctggcgagcagacaagcacactcccatgagacgcagcgcgcgttattctacgtgaaaacggattaaacggcaggttaaaccgagtatctttgtgaatattttttcacgttagtatcaagtggctgtgaggacgcgaaaaaatccccttgcccgcctgtaacaccgcgctgaatcagggtctgccactcgcttcgcgaacgcacgccggtggcgtaaacctgggtgctggtcccggagcaggcttccaccaggctttgaaccagcagctggttctccgttcgcttctcaatgtttctgaccagccccggatggagcttgagtaactcaacattaagttctttgatccaactggtacttaccagcgtcaaaccagcctggttgacggctacccgtacccctaaagcattcactaaacgaataacaggttgtaaacgactgatatgttgacctacatcggcctctgcaagttcaataattatgcgttttcgttgtgatttttcacattgcattaacgtatcgcgcagccaacgctgaaaacgcgggcgaatcagcgactcaacggtaacctgaatcgccagattttcctctggccagtaacgcaatagtggaataagacggctgatttgcagacggtcatactcttccgataagccaaactgcaagaccatcggcatatactccgccgagctaacctcttcattaccatcgaagatgcggcacatgagttcgcgatgatgaacctgaccttcgcgagtaaccgccggtttttgataaaggcgcgggccgccgcgactgagcatttgctcgataagcgtacgccagcgaacattaccgcgtcctttttcaggcaacgagtcatcgtaaatagcccagctattgccgccctgcaatcccgcattacgcgtggcagactctgcatgttccattacctgctcggtatcctgaccactacgccaggcgcagataccaatgtggatcatatcgtcgcgatcgagcattttattgttcggcaaggtatcaacggctttgattaactgaccggcgatgctctctgcctcttttaacgtccggtgcggtaacagcgcagcaaaatcactgcggtggtaacgcgccagcagtgcgccagggtagcgcatcataaatgtcgacagcagattcgtcagagtgaagaactgttcttcaacctggctgtgcccccaggtatcgctcaacatattgaaatccggcagacgaatcatcatcacgatcccgtgggtacctactttctcctgatcttccagtaacgttgctaactgattatcgaaaaagagtcggttattgaggccggttttcacgtcctgggcggcataagagcggatcagcgtatcaagacggctgtgttgttcgcgtgcgttctgaatttcacgaagcagcgtatccagcgcactgctggttctgggcggccattcatagatggttcccaacacattagagccacgctcaccgtttaagatacgagtagcccgggtttccagcaattcttgcccggcaagttgccgttgtaaccagcgtaccgccaggaagagcataacaatgataaagccaatcgcccccgtgagcggcgcggtggtcatcaacgaatggaaatagttgcccatcggatcctgataaaccagacgcaacgacatccccggatgctttatcaacggaacgctcagttcgcgaaacagatcgctggagccaactggacgataactaccatttctggccagggtataaacctgtttatcaccatggagcaggtctacacgaacgatatctgccgacatcattaattcggtaatttgtggccttaatacgctgaagtcattcgacacaaggtgggtatcaatcgccgtcgccaccgcctgaacgcgatgactaaacttatactgaatggcgttgtagaaacttagcgaacagcccagcaaagtcacaaaaattgttaacccggtgagcagcgtaacaaaggccgaaaatttcgtcgttaatctcatccttgtgttaactccgatagtgaggaagcgggcatactagcaaatcagatttatctcgcaatttattgcgcttcatcggctttgcttttccattagcgagtatagtcttcagaaattattttccaatccatcatgcacatgaggaccacttatgcaggcgttacttttagaacagcaggacggcaaaactctcgcatcagtacagactctggacgaaagtcgcctgccggagggcgatgtcacggtcgatgttcactggtcgagcctgaactataaagatgcgctggcgattaccggtaagggaaaaatcatccgtaattttccgatgattcctgggatcgattttgccggaactgtacgcaccagcgaagatccgcgttttcatgccggtcaggaggtgttactcactggctggggcgttggtgaaaaccactggggtgggctggcggagcaggcgcgagtgaaaggtgactggctggttgccatgccgcaagggctggacgcgcgtaaagcaatgattatcggtactgccggttttaccgccatgctgtgtgtgatggcgctggaagatgccggtgttcgcccgcaggacggggagattgtcgtgacgggtgccagtggtggcgtcggcagtaccgccgtggcgctgctgcataagttgggttatcaggtcgttgccgtttccggtcgcgaaagtacccatgaatatctgaaaagtttaggtgctagccgtgttctccctcgtgatgagtttgccgaatcccgtcctctggaaaaacaagtctgggctggggcaattgacaccgttggcgacaaagtgctggcaaaagtgctggcgcaaatgaattacggcggctgcgtggcggcctgtggtctggcgggtggttttactctgccaaccacggtcatgccatttattctgcgtaatgtccgtttgcaaggggtggattcagtaatgacgccaccagaacgccgcgcacaagcctggcagcgactggtcgccgatttaccggaatcattctatacccaggcggcaaaagagatatctctgtcagaggcaccgaactttgccgaggccatcattaataaccagatccagggtcgcacgctggtgaaggttaactaaccatttagcagggaataataagagagggaactcattttgaaatcattattcaatcggttaacgggaaaagcggttagccggacagctttcgtcgaacaccttggtcaggaagttatacaacatcatccaaactggaaagtcatgatttcgactgaccacaaattgatgcgcattgatactccactaaacagctattattgatacgcctccgtcgcctgttaggtttatggtgctttgcctgggcgacgctacgcttagccccttacttatttctggtaccatggggtgaataatctgattttgtttgactacaaattaatcactcgaacctatttaatgctgagcattgtcaatcggttaattttgcgtgctttagcattcacatctatccagacgatgcagtgaaaattgggtaatccccagcaaccgctgcgtaatgtcgtctatcttgtcgcgatcctggcatccctacattatttgtggtctgtgaagattatctcattgcagcccctcatcttcgcagggctggcttttcagcttttcaccttacgttataagaagttccgtcgatgatggcgctaatttcgtgaattgtgcggcttgttgcaaattacacggtgttgaaggttatttacatgttagctgttgattatcttccctgataagaccagtatttagctgccaattgctacgaaatcgttataatgtgcgacctcgtcctccctgacgcagtttttgcgctgcggaaaaggtgacattggcgcaacgaaggtatattttgttttttgccggaggatagcagcagatcgctgcacaatgtccgtcgagtctaacattgacactctggggcaaaatagaccggcgtcccggcctgctggaatttatcgctatgcatacagctgtcggggcatacgctttacagacggcggtgaaacgcctgtcacaatcacactaaacaaagagtacggaacccactcatggatattcgtaagattaaaaaactgatcgagctggttgaagaatcaggcatctccgaactggaaatttctgaaggcgaagagtcagtacgcattagccgtgcagctcctgccgcaagtttccctgtgatgcaacaagcttacgctgcaccaatgatgcagcagccagctcaatctaacgcagccgctccggcgaccgttccttccatggaagcgccagcagcagcggaaatcagtggtcacatcgtacgttccccgatggttggtactttctaccgcaccccaagcccggacgcaaaagcgttcatcgaagtgggtcagaaagtcaacgtgggcgataccctgtgcatcgttgaagccatgaaaatgatgaaccagatcgaagcggacaaatccggtaccgtgaaagcaattctggtcgaaagtggacaaccggtagaatttgacgagccgctggtcgtcatcgagtaacgaggcgaacatgctggataaaattgttattgccaaccgcggcgagattgcattgcgtattcttcgtgcctgtaaagaactgggcatcaagactgtcgctgtgcactccagcgcggatcgcgatctaaaacacgtattactggcagatgaaacggtctgtattggccctgctccgtcagtaaaaagttatctgaacatcccggcaatcatcagcgccgctgaaatcaccggcgcagtagcaatccatccgggttacggcttcctctccgagaacgccaactttgccgagcaggttgaacgctccggctttatcttcattggcccgaaagcagaaaccattcgcctgatgggcgacaaagtatccgcaatcgcggcgatgaaaaaagcgggcgtcccttgcgtaccgggttctgacggcccgctgggcgacgatatggataaaaaccgtgccattgctaaacgcattggttatccggtgattatcaaagcctccggcggcggcggcggtcgcggtatgcgcgtagtgcgcggcgacgctgaactggcacaatccatctccatgacccgtgcggaagcgaaagctgctttcagcaacgatatggtttacatggagaaatacctggaaaatcctcgccacgtcgagattcaggtactggctgacggtcagggcaacgctatctatctggcggaacgtgactgctccatgcaacgccgccaccagaaagtggtcgaagaagcgccagcaccgggcattaccccggaactgcgtcgctacatcggcgaacgttgcgctaaagcgtgtgttgatatcggctatcgcggtgcaggtactttcgagttcctgttcgaaaacggcgagttctatttcatcgaaatgaacacccgtattcaggtagaacacccggttacagaaatgatcaccggcgttgacctgatcaaagaacagctgcgtatcgctgccggtcaaccgctgtcgatcaagcaagaagaagttcacgttcgcggccatgcggtggaatgtcgtatcaacgccgaagatccgaacaccttcctgccaagtccgggcaaaatcacccgtttccacgcacctggcggttttggcgtacgttgggagtctcatatctacgcgggctacaccgtaccgccgtactatgactcaatgatcggtaagctgatttgctacggtgaaaaccgtgacgtggcgattgcccgcatgaagaatgcgctgcaggagctgatcatcgacggtatcaaaaccaacgttgatctgcagatccgcatcatgaatgacgagaacttccagcatggtggcactaacatccactatctggagaaaaaactcggtcttcaggaaaaataagactgctaaagcgtcaaaaggccggattttccggccttttttattactggggatcgacaacccccataaggtacaatccccgctttcttcacccatcagggacaaaaaatggacactcgttttgttcaggcccataaagaggcgcgctgggcgctggggctgacccttttgtatctggcagtttggttagtagccgcttacttatctggcgttgcccccggttttaccggctttccgcgctggtttgagatggcctgcatcctgacgccgctgctgtttattggactgtgctgggcgatggtgaaatttatctatcgcgatatcccactggaggatgacgatgcagcttgaagtaattctaccgctggtcgcctatctggtggtggtgttcggtatctcggtttatgcgatgcgtaaacggagcaccggcaccttccttaatgagtatttcctcggcagccgctctatgggcggtattgtgctggcgatgacgctcaccgcgacctatatcagtgccagttcgtttatcggcgggccaggagctgcttataaatacgggctgggctgggtattgctggcgatgattcagcttcctgcagtctggctttcactcggtattctcggcaagaagtttgcgattcttgcgcgccgctacaatgcagtgacgctgaacgatatgctgtttgcccgctaccagagtcgtcttctggtgtggctggcgagtttgagtttgctggttgcgttcgttggtgcgatgaccgtgcagtttatcggcggtgcgcgcctgctggaaaccgcggcgggtattccttatgaaaccgggctgctgatttttggtatcagcattgcgttatataccgcctttggtggctttcgcgccagcgtgctgaacgacaccatgcaagggcttgtgatgctgattggcaccgttgtgctgcttattggcgtagtacatgccgctggcggcttaagtaacgcagtacagaccttgcaaaccatcgatccgcaactggttacgccacaaggcgctgacgatattctgtcgcctgcctttatgacgtcgttctgggtactggtgtgttttggcgtgattggcctgccgcatactgcggtgcgctgtatctcttataaagacagcaaagccgtacatcgggggatcatcatcggtacgattgtggtcgcaattctgatgttcggtatgcacctggccggagcgttaggtcgggcggtgatccccgatctcaccgtaccggacctggtgatcccaacgttaatggtaaaagtgctgccaccgtttgctgccgggatcttcctggctgcaccgatggctgcgatcatgtcgacaattaacgcccaactgctgcaaagttccgctacgatcattaaagatctctatctgaatatccgtccggatcaaatgcaaaacgagacgcgtctgaagcggatgtcggcggtaattacgttagttctcggcgcgttgctgctgcttgccgcctggaagccgccagaaatgatcatctggctgaatttgttggccttcggtgggctggaagccgttttcctgtggccgctggtgctgggtctttactgggaacgcgccaacgccaaaggcgcgctaagtgcgatgatcgttggcggcgtgctgtatgccgtactcgcgacgctgaatattcagtacctgggcttccaccctatcgtgccctcgttactactaagtttgctggctttcctggtcggaaaccgtttcggtacatccgtcccgcaagctaccgttttgactactgataaataaagagttttgccatgccttggatccaactgaaactgaacaccaccggcgcgaacgcggaagatcttagcgatgcgctgatggaagcgggtgccgtttctatcacttttcaggatacccacgatacgccagtatttgaaccgctgccgggcgaaacgcgcctgtggggcgacaccgatgtgattggtctgttcgacgctgaaaccgatatgaacgacgtggtggcgattctggaaaaccatccgctgctcggcgcaggcttcgcgcataaaatcgaacaactagaagataaagactgggagcgcgaatggatggataatttccacccgatgcgctttggtgaacgactgtggatctgccctagctggcgtgatgtgccggacgaaaacgccgtcaacgtgatgttagatccagggctggcgtttggtacgggtacccatccaaccacctctctgtgcctgcaatggctcgacagcctcgatttaaccggtaaaacagtcatcgactttggctgtggttccggcattctggcgatcgcggcgctgaaactgggtgcagcaaaagccattggtattgatatcgatccgcaggcgattcaggccagccgcgataacgccgaacgtaatggcgtttctgaccgtctggaactctacttaccgaaagatcagccagaagaaatgaaagccgacgtggtggtcgctaacatccttgcaggcccattacgtgaactggcaccgttaatcagcgtcctgccggtttcaggcggtttgctgggcctttccggtattctggcaagccaggcagagagcgtttgtgaagcttatgccgatagcttcgcactggacccggtcgtggaaaaagaagagtggtgccgtattaccggtcgtaagaattaaccttcgcatcgccgtagggtgacgcggggcgaagtgcgagcaagctcacaaaaggcacgtaaatttgccgattatttacgcaaatttgcgtgccaaaattttcattcataaagaaaaattgagaacttactcaaatttctttgagtgtaaattttagtcactattttctaatatgatgatttttatgagtaattatcgcaccacgctcattttaaatgcaattctttgatccatctcagaggattggtcaaagtttggcctttcatctcgtgcaaaaaatgcgtaatatacgccgccttgcagtcacagtatggtcatttcttaactcatgcgcatcggacaatatcagctcagaaatcgcctgatcgcagcgcccatggctggcattacagacagaccttttcggacgttgtgctacgagatgggagccggattgacagtatccgagatgatgtcttctaacccacaggtttgggaaagcgacaaatctcgtttacggatggtgcacattgatgaacccggtattcgcaccgtgcaaattgctggtagcgatccgaaagaaatggcagatgcagcacgtattaacgtggaaagcggtgcccagattattgatatcaatatgggttgcccggctaaaaaagtgaatcgcaagctcgcaggttcagccctcttgcagtacccggatgtcgttaaatcgatccttaccgaggtcgtcaatgcagtggacgttcctgttaccctgaagattcgcaccggctgggcaccggaacaccgtaactgcgaagagattgcccaactggctgaagactgtggcattcaggctctgaccattcatggccgtacacgcgcctgtttgttcaatggagaagctgagtacgacagtattcgggcagttaagcagaaagtttccattccggttatcgcgaatggcgacattactgacccgcttaaagccagagctgtgctcgactatacaggggcggatgccctgatgataggccgcgcagctcagggaagaccctggatctttcgggaaatccagcattatctggacactggggagttgctgcccccgctgcctttggcagaggttaagcgcttgctttgcgcgcacgttcgggaactgcatgacttttatggtccggcaaaagggtaccgaattgcacgtaaacacgtttcctggtatctccaggaacacgctccaaatgaccagtttcggcgcacattcaacgccattgaggatgccagcgaacagctggaggcgttggaggcatacttcgaaaattttgcgtaaacagaaataaagagctgacagaactatgttcgaacaacgcgtaaattctgacgtactgaccgtttctaccgttaactctcaggatcaggtaacccaaaaacccctgcgtgactcggttaaacaggcactgaagaactattttgctcaactgaatggtcaggatgtgaatgacctctatgagctggtactggctgaagtagaacagcccctgttggacatggtgatgcaatacacccgtggtaaccagacccgtgctgcgctgatgatgggcatcaaccgtggtacgctgcgtaaaaaattgaaaaaatacggcatgaactaattcaggttagctaaatgcttgattaaaaaggcgctactcggcatggggaagcgccttttttataggtgtcacaaagggagtgaccatgagaacaggatgtgaaccgacccggtttggtaatgaagctaagaccattattcacggtgatgcgcttgccgaacttaaaaagatccccgccgaaagtgtcgatctgatctttgccgacccaccatataacatcggtaaaaattttgatggtctgatcgaagcctggaaagaagatctgtttatcgactggctgtttgaagtgattgcagagtgccaccgcgttctgaaaaagcagggcagcatgtacatcatgaacagtacggaaaacatgccctttatcgatctccagtgccgcaagctttttaccatcaaaagtcgcatcgtctggtcatatgacagttctggagtgcaggcgaaaaaacactacggctccatgtacgaacccatcctgatgatggtgaaagacgcaaagaactacacattcaacggtgatgctattctggtagaagccaaaaccggatcgcagcgcgcgttgatcgattatcgcaaaaatcctccacagccttacaatcatcaaaaagtaccgggtaacgtttgggattttccgcgcgtgcgttatttgatggatgaatatgaaaaccacccgacgcaaaaaccggaagccttactgaaacgcattattctcgcctcttccaacccaggcgatatcgttctcgacccgtttgctggtagctttactaccggtgccgtagccatcgccagcggacgaaaattcattggtattgagatcaacagcgagtacatcaaaatggggcttcgacggctggatgtcgcgtcgcattactctgcggaagaactggcgaaagtgaaaaaaagaaagaccggcaacctgtcaaaacgaagccggttaagcgaagttgaccccgatctcattacaaagtaaaggatgtgtaagcctggttttcagattattcatttcgtgtatatttcctgccagacttggttaaacatgcacaggctcaggtaatgattcgcaagtattggtggctcgtcgttttcgctgtcttcgtttttctgtttgatactttactgatgcagtggattgaactgctggcaacagaaacagacaaatgccgcaatatgaactcagttaatccactaaaactggttaactgtgacgaactgaattttcaggacagaatgtgaatttacatgacacttaattcattcgtttgatgaattaatttcgttatgttttcatctggcatgaacattcttaatacgttatcgaccagagcgggggcttgtttataaagatcataacccgccatattcattaaccagttttgaacaattccgctgaaggcaccatcaataataatcatcacaacatctaaatcgaggttatttgctacacaaccttgttgctgacacgcctgcaatacttcgcggagagtctgcggattaaagcccatcttttcgcgtatcactccctcggccagcatctcatcattaaattcacatttgtgatataagattttcagcaacgcctgctggcggggaattttggcaatatattgcaagccgacaatcaatttttcacgcaattgttgaaacgggtcatgctctaatccagccgtcaagtgttcctggattaactcccgcaatgaaggctgttgcaaccacatctcattaaacagttgagtcttgttttcgaagtgccagtagatagcgccacgcgtaacgttagcggcgtcggcaatgtcgttgagcgtcgtcttgcttacgccatgctgcgcaaactgggcgatggcagtttcaatcagttcttgccgggtcttcagagcttcggctttggttctttttgccatgattaattattcaggaaataaatatattcgacacagagtgagaaaatagcgaaggttaatctatcacctaatgtgtatttatacgagaggctaatattgagttgctataaatcgttaaataaataatatatattatttacctaagatacattcactacatcaatatatatttcaatttacgaggttttaattctgcctctttcaacccgcgtcaaaataaaacagtagaatattaatctttttttgtgtttatgtgccttgagatgcctgtattcataactattccttacatcgacgaatgataatttgtaggatagcgaactgtatttttctttctgcgagttaacgcgttgcctttttgggtaaataacgcgcttttggttttttgaggaatagtaatgacgaaacatgccaggtttttcctcctgccctcctttattctgatctccgcggctttaatcgccggttgtaacgataagggagaagagaaagctcacgtcggtgaaccgcaggttaccgttcatattgtaaaaacggccccgttagaagttaagactgaattgccaggccgcaccaatgcttatcgtatagccgaagttcgcccacaggttagcgggatcgtactgaatcgcaatttcactgaaggcagcgatgtgcaagcaggccagtccctgtaccagatcgatcccgcgacctatcaggcaaattatgacagcgcgaaaggcgaactggcgaaaagtgaagccgccgccgccatcgcgcatttgacggtaaaacgttacgttccgctcgtgggtacgaaatacatcagccagcaggagtacgaccaggccattgctgatgctcgtcaggccgatgccgccgtgattgccgcaaaagccacagtcgaaagcgctcgcatcaatcttgcttataccaaagtcactgcgccaattagcggacgtatcggcaaatcgactgtgaccgaaggcgctcttgtcactaatgggcaaacgactgaactggcgactgtccagcagctcgatcctatctacgttgatgtgacccaatccagcaacgattttatgaggctgaagcaatccgtagagcaaggaaatttgcataaggaaaacgccaccagcaacgtagagttggtcatggaaaacggtcaaacctatcccctgaaaggtacgctgcaattctccgatgtgaccgttgatgaaagcaccggctccataaccctacgtgctgtcttccctaacccgcaacatacgcttttgccgggtatgtttgtgcgtgcacggattgatgaaggcgtccaacctgacgccattcttatcccgcaacaaggcgttagccgcacaccgcgtggtgatgcaaccgtgctgattgttaacgataaaagtcaggttgaagcgcgccctgtcgttgccagtcaggcgattggcgataaatggttgattagtgaaggactgaaatctggcgatcaagtcattgtcagcggcctgcaaaaagcgcgtccgggagagcaggttaaagccactaccgatacccccgcagatactgcatcgaagtaaggtaatctgacatggcaaacttttttattcgacgaccgatatttgcatgggtgctggccattattctgatgatggcgggcgcactggcgatcctacaattgcccgtcgctcagtatccaacaattgcaccgcctgcggtttctgtttcagcaaactatccgggcgctgatgcgcagaccgtgcaggatacggtgacgcaggttatcgaacagaatatgaacggtatcgataacctgatgtatatgtcctccaccagcgattccgccggtagcgtgacaattacccttaccttccagtccgggaccgatcctgatatcgcgcaagtgcaggtgcagaacaaactccagctcgccacgccgttgctgccgcaggaggttcagcagcaggggatcagtgttgaaaagtccagtagcagctatttgatggtggcgggctttgtctctgataacccaggcaccacacaggacgatatctcggactatgtggcctctaacgttaaagatacgcttagccgtctgaatggcgtcggtgacgtacagcttttcggcgcacagtatgcgatgcgtatctggctggatgccgatctgctaaacaaatataaactgacaccggttgatgtgattaaccagttgaaggtacagaacgatcagatcgctgccggacagttgggcggaacgccagcgttaccagggcaacaattgaacgcctcgattattgctcagacgcggtttaaaaatccggaagaattcggcaaagtgaccctgcgcgtaaacagtgacggctcggtggtacgcctgaaagatgtcgcacgggttgaacttggcggtgaaaactataacgttatcgctcgtatcaacggaaaaccggcggcgggcctggggattaagctggcaaccggcgcgaatgctctcgataccgcgaaagccattaaggcaaaactggcggaattacagccattcttcccgcagggaatgaaggttctctacccttatgacaccacgccattcgtccagctttctattcacgaagtggtaaaaacgctgttcgaagccattatgctggtgttcctggtgatgtatctgttcttgcagaatatgcgagcaacgctgatccccaccattgcggtacccgtggtgttgttagggacgtttgccatcctcgccgcttttggttactccatcaacacactaacgatgttcgggatggtgcttgccatcgggctgctcgtcgatgatgcgatagtggtggtggagaacgtcgagcgcgtgatgatggaggataagctcccgccaaaagaagcgacggaaaaatcgatgtcgcaaattcagggcgcactggtgggtatcgcgatggtgctgtcagcggtatttattccgatggcattcttcggcggttctactggggcaatttatcgccagttctctatcaccatcgtttcggcaatggcgctttctgttctggtggcattgattcttacccctgcgttatgtgcaacgctgcttaaacccgtctctgctgagcatcacgaaaataagggcggtttcttcggttggtttaataccaccttcgatcatagcgttaaccactacaccaacagcgtcggcaaaatcctcggatccacaggacgatatttactgatctatgcgctgattgttgcaggaatggtggtgttgtttttacgtcttccgtcttccttcttacctgaagaggatcagggtgtctttctgaccatgattcagttacccgctggcgcgacgcaagagcggacgcaaaaagtgttggatcaagttacggattactatctgaagaacgagaaagcgaacgttgaaagtgtctttacggttaacggctttagcttcagcggccaggcacaaaacgccggtatggccttcgtcagtctgaaaccgtgggaagagcgtaatggtgacgaaaacagtgcggaagcggtaatccatcgtgccaaaatggaattgggcaagatccgcgacggttttgtcattccattcaatatgccagccattgttgaactgggcacggcaacgggtttcgactttgagttaattgatcaggctgggctgggtcacgatgccctaacccaggcccgtaaccagttgcttggtatggcggcgcaacatcctgccagcttagtcagcgtgcgccctaatggcctggaagacaccgcgcagtttaaactggaagttgaccaggaaaaggcgcaggcattaggtgtttcactttctgacatcaatcagaccatttcaacggcgctgggtgggacttacgttaacgacttcatcgaccgtggtcgcgtgaaaaagttgtatgttcaggcggatgccaaattccgtatgctgccagaagatgtcgataaactttatgtccgcagcgccaacggcgaaatggtgccattctcggcctttaccacttcacattgggtgtatggctctccgcgactggaacgctacaacggtctgccgtcaatggagattcagggggaagccgcgccaggaaccagttccggcgatgccatggcgttgatggaaaaccttgcgtcaaaattacctgcgggcattggttatgactggacgggtatgtcgtatcaggaacgcttatcgggaaaccaggctcccgctctggtagcaatttcctttgtggttgttttcctgtgccttgctgcactctatgaaagctggtcaattcctgtctcggttatgttggtagtgccgttagggattgtcggcgtgctgctggcggcgacactctttaatcaaaaaaatgacgtctactttatggtgggcttgctaacgacaattggcttgtcggccaaaaacgctattttgatcgttgagttcgctaaagatctcatggagaaagagggtaaaggtgttgttgaagcgacactgatggcagtacgtatgcgtctgcgtcctatcctgatgacctctctcgcctttattctcggcgtattaccgctagctatcagtaacggtgccggcagtggcgcgcagaacgctgtgggtatcggggtaatgggaggaatggtctctgcaacgttgctggcaatcttcttcgtaccggtgttctttgtggtgatccgccgttgctttaaaggataaatcagaaacataaaggcgctttcgggtgcctttattatttccagtgaaacccataaaaattaataagatattcttctgctcactctttaaaagctttctatagttcccgctcccttcactatttttacaattcacataatttgtcattattcattccgcaagatttataacctccggtgataaaatggcattcagctcgttaataagagagttaacttattaagcgttagcgtttattactgaggtaacaccatgaaaagattaattcctgtggcattgctcaccgcattgctggcgggctgtgctcacgattcgccctgcgttccggtttatgacgatcagggtcgtctggttcacaccaatacctgtatgaaaggcacgactcaggataactgggaaacggctggggctattgccggcggggcagctgctgttgctggcctgacgatggggatcatcgctctatcgaaataactgaacagggcgcggagttccgcgctctttttaacgatacagtatctctccataagataaaatattgctatattctgctgggtaattccctgctgatttagcatgttacatcgcgttatttcgctgctttcgaaataacgcatcaatttaattttcacacttcccaccagaaatatactcacgctaacaatcattattctgcttagtaaaacacgcgtaaatattttgcgccaaaatgtggcgcatgtttcattttcgcaccattgcggggcgctgtttttattatttcctgtctacactcagcttattgcgacgcgaaatcgtgcgcaaaagctggcactacttttgcttataaaaggatggccacagacaggtaaaagacgtttcccaaacgtcctataacgataattttcgcctcacaggaagcattatgaaaaagatgatgatagccacactggctgccgccagcgtgctgcttgccgttgcaaatcaggcgcatgctggcgcgacgcttgatgccgttcagaaaaaaggttttgtgcaatgcgggatcagtgatggattacctgggttctcttatgccgatgctgacggtaagttttcaggtattgatgttgatatttgtcgtggtgttgccgctgctgtatttggtgacgacacgaaagtgaaatataccccgctcactgcaaaagaacgcttcaccgctttacagtcaggggaggtggatttgctctcccgtaatacgacctggacttcatctcgcgatgccgggatgggaatggcatttaccggcgtcacttattacgacggcattggcttcctgacgcacgataaagcggggctaaaaagcgcgaaagaactggatggcgctaccgtctgtattcaggcgggtactgataccgaactcaacgtcgccgactacttcaaggcaaacaatatgaagtacacaccggtgactttcgatcgctctgacgaatcagcgaaggcactggaatctggtcgctgcgatacgctggcctcggatcaatcacaactgtatgccctgcgcatcaaattaagcaacccagctgaatggattgtcttaccggaagttatctcaaaagaaccgcttggtccggtagttcgtcgtggcgatgatgaatggttctcgattgtacgctggacgcttttcgccatgctgaatgctgaagagatgggcatcaattcccagaacgtcgatgaaaaagcggctaatccagcaacgcctgatatggcacatctgctgggtaaagaaggcgattacggcaaggatctgaagctggataataaatgggcctataacatcatcaaacaggtgggtaactactcggaaatttttgagcgtaacgtaggttcagaaagcccgctgaaaattaaacgtgggcaaaataatctctggaataacggcggtattcagtacgcaccgcccgtgcgttaagtcggtgtgaggtaacgagcgtcgctacggcggcgctctcttcagcgttatgctttccgaggtttctatgtctcatcgccgctcaaccgttaaaggctcactctcttttgccaaccctacggttcgcgcctggttattccagatccttgccgttgttgctgttgtcggcattgttggttggttatttcacaacactgtaacgaatctcaataatcgtggcattacttcaggttttgcctttctggatcgcggcgctggcttcggtattgtccagcatttgatcgattaccagcagggcgacacctacggacgcgtttttattgtcggcttactcaatacgctactggtttctgcattgtgtattgtgttcgcttctgttttgggcttctttatcggtctggcgagactttcggataactggctgctacgaaagctttccacaatttatattgagatcttccgtaatattcccccgctgctgcaaatcttcttctggtactttgccgtgttgcgcaatttgcccggaccacgccaggctgtgagcgcgtttgatctggcctttttgagcaatcgtgggctttatattccgtcaccgcagctgggagacggatttattgcgtttatcctggctgttgttatggctatagtcctttctgttgggctattccgctttaataaaacataccagataaagaccggacaactgcgccgcacctggccgatcgccgcagtgttgatcattggtttgcctttactggcgcaatggctttttggcgcagcactacactgggatgtcccagccctacgaggctttaacttccgcggcgggatggttttaattcctgaactggcagccttaacgctggcactttcggtttatacatctgcatttatcgccgagattatccgcgctgggatccaggcagtgccttatggtcaacatgaagcggctcggtcactgggattacccaacccggttacgctacgccaggtcattattccccaggcattgcgggtgattattccaccgttaaccagccagtatctcaacatcgtcaaaaactcctctcttgccgccgctattggctatcccgatatggtttcgctgtttgccggcaccgtgctgaatcagacggggcaagccatcgagacgatagccatgaccatgtcggtctatctgattatcagcctgactatctcgctgctgatgaatatctataaccgccgcatcgcgatcgttgaacgctaaggagtcatgatgacaaaagtattgctgtctcatcccccgcgcccggcgagccataactcaagccgcgcgatggtgtgggtgcgaaaaaatctgttctccagctggagcaatagcctgctgactattggctgcatatggttgatgtgggaactgatcccaccgttgctgaactgggcatttttgcaggctaactgggttggctcaacgcgtgccgactgcacaaaagccggtgcctgttgggtcttcatccacgaacgatttggtcagtttatgtatgggctttacccacacgaccaacgctggcgaattaacctcgcattactgattgggcttgtgtcgatcgcaccaatgttctggaaaatactcccgcatcgcggtcgctatattgcggcctgggcggtgatttacccactgattgtctggtggctgatgtatggcggtttttttgctcttgagcgggttgaaacccggcaatggggcgggctgacgctaactttaattattgcatcagttgggattgcgggggcgctaccgtgggggatcttactggcgttaggtcgccgctcccatatgccgattgtgcgtatcttatcggtcatttttatcgaattctggcgcggcgtgccgctgattaccgttctgtttatgtcttcggtcatgctgccgttgtttatggcagaaggcaccagtatcgacaaattgatccgcgcgctggttggcgtgatcctgtttcagtcagcatatgttgcggaagtcgtgcgaggtggattacaggcgctgcctaaagggcaatatgaagcggcagagtcgctggcgttgggttactggaaaactcaggggctggttattctgccacaggcgttgaagctggtaattcctgggctggtaaataccatcatcgcactcttcaaagataccagcctggtgatcattatcgggttgttcgatcttttcagtagcgttcagcaggcaaccgttgatcccgcctggttgggtatgtcgacggaagggtatgttttcgccgcgctgatctactggatcttctgtttcagcatgtcgcgctatagccagtatctggaaaaacgttttaacaccgggcgtacaccgcattgaggacactatgagccaaattttactgcaacctgctaacgcgatgattacgctggaaaacgtcaataaatggtatggacaattccatgttttgaaaaatataaatttaaccgtgcaaccgggagaacggatcgttctgtgtggcccttcaggttccggtaaatcgacaaccattcgttgtattaatcatctggaagaacatcaacagggacggatcgtggtagatggcatcgaacttaatgaagatatccgcaatattgagcgcgtcaggcaggaagtgggaatggtctttcagcatttcaatctcttccctcatctgaccgttttacagaactgtaccctggcaccgatttgggtacgcaagatgcctaagaaagaggctgaagatctggcggtgcattacctagagcgggtgagaattgccgaacatgcgcataagtttcccggacagatttcaggtggtcagcagcaacgcgttgccattgcgcgttcgctgtgtatgaagccgaaaattatgttgtttgatgagccaacgtcggcgctcgatcctgagatggtgaaagaggtgctggatacgatgattgggctggcgcagtcgggtatgacaatgttgtgtgtaacacatgagatggggtttgcacgaaccgtcgctgaccgggtaatttttatggatcgtggggaaatagtggagcaagctgcacctgatgaattttttgcgcatcctaaatcagagcgtacgagggcatttttatcgcaggtaatccattaattgaatgttagttcgaaaagcaaaaaggccatcctttcggatggcctttcgcttgatttgatgtctggcagtttatggcgggcgtcctgcccgccaccctccgggccgttgcttcgcaacgttcaaatccgctcccggcggatttgtcctactcgggagagtgttcaccgacaaacaacagataaaacaaaaggcccagtcttccgactgagccttttgttttatttgatgtctggcagttccctactctcgcatggggagaccccacactaccatcggcgctacggcgtttcacttctgagttcggcatggggtcaggtgggaccaccgcgctactgccgccagacaaattcttttctaatctgccgaactttaacctaaaaagtggtgctgatacccagagtcgaactggggacctcacccttaccaagggtgcgctctaccaactgagccatatcagcacgctaaatttgatgcctggcagttccctactctcgcatggggagaccccacactaccatcggcgctacggcgtttcacttctgagttcggcatggggtcaggtgggaccaccgcgctacggccgccaggcaaattctgttttatcagaccgcttctgcgttctgatttaatctgtatcaggctgaaaatcttctctcatccgccaaaacagcttcggcgttgtaaggttaagcctcacggttcattagtaccggttagctcaacgcatcgctgcgcttacacacccggcctatcaacgtcgtcgtcttcaacgttccttcaggacccttaaagggtcagggagaactcatctcggggcaagtttcgtgcttagatgctttcagcacttatctcttccgcatttagctaccgggcagtgccattggcatgacaacccgaacaccagtgatgcgtccactccggtcctctcgtactaggagcagcccccctcagttctccagcgcccacggcagatagggaccgaactgtctcacgacgttctaaacccagctcgcgtaccactttaaatggcgaacagccatacccttgggacctacttcagccccaggatgtgatgagccgacatcgaggtgccaaacaccgccgtcgatatgaactcttgggcggtatcagcctgttatccccggagtaccttttatccgttgagcgatggcccttccattcagaaccaccggatcactatgacctgctttcgcacctgctcgcgccgtcacgctcgcagtcaagctggcttatgccattgcactaacctcctgatgtccgaccaggattagccaaccttcgtgctcctccgttactctttaggaggagaccgccccagtcaaactacccaccagacactgtccgcaacccggattacgggtcaacgttagaacatcaaacattaaagggtggtatttcaaggtcggctccatgcagactggcgtccacacttctaagcctcccacctatcctacacatcaaggctcaatgttcagtgtcaagctatagtaaaggttcacggggtctttccgtcttgccgcgggtacactgcatcttcacagcgagttcaatttcactgagtctcgggtggagacagcctggccatcattacgccattcgtgcaggtcggaacttacccgacaaggaatttcgctaccttaggaccgttatagttacggccgccgtttaccggggcttcgatcaagagcttcgcttgcgctaaccccatcaattaaccttccggcaccgggcaggcgtcacaccgtatacgtccactttcgtgtttgcacagtgctgtgtttttaataaacagttgcagccagctggtatcttcgactgatttcagctccacgagcaagtcgcttcacctacatatcagcgtgccttctcccgaagttacggcaccattttgcctagttccttcacccgagttctctcaagcgccttggtattctctacctgaccacctgtgtcggtttggggtacgatttgatgttacctgatgcttagaggcttttcctggaagcagggcatttgttgcttcagcaccgtagtgcctcgtcatcacgcctcagccttgattttccggatttgcctggaaaaccagcctacacgcttaaaccgggacaaccgtcgcccggccaacatagccttctccgtccccccttcgcagtaacaccaagtacaggaatattaacctgtttcccatcgactacgcctttcggcctcgccttaggggtcgactcaccctgccccgattaacgttggacaggaacccttggtcttccggcgagcgggcttttcacccgctttatcgttacttatgtcagcattcgcacttctgatacctccagcatgcctcacagcacaccttcgcaggcttacagaacgctcccctacccaacaacgcataagcgtcgctgccgcagcttcggtgcatggtttagccccgttacatcttccgcgcaggccgactcgaccagtgagctattacgctttctttaaatgatggctgcttctaagccaacatcctggctgtctgggccttcccacatcgtttcccacttaaccatgactttgggaccttagctggcggtctgggttgtttccctcttcacgacggacgttagcacccgccgtgtgtctcccgtgataacattctccggtattcgcagtttgcatcgggttggtaagtcgggatgacccccttgccgaaacagtgctctacccccggagatgaattcacgaggcgctacctaaatagctttcggggagaaccagctatctcccggtttgattggcctttcacccccagccacaagtcatccgctaatttttcaacattagtcggttcggtcctccagttagtgttacccaaccttcaacctgcccatggctagatcaccgggtttcgggtctataccctgcaacttaacgcccagttaagactcggtttcccttcggctcccctattcggttaaccttgctacagaatataagtcgctgacccattatacaaaaggtacgcagtcacacgcctaagcgtgctcccactgcttgtacgtacacggtttcaggttctttttcactcccctcgccggggttcttttcgcctttccctcacggtactggttcactatcggtcagtcaggagtatttagccttggaggatggtccccccatattcagacaggataccacgtgtcccgccctactcatcgagctcacagcatgtgcatttttgtgtacggggctgtcaccctgtatcgcgcgcctttccagacgcttccactaacacacacactgattcaggctctgggctgctccccgttcgctcgccgctactgggggaatctcggttgatttcttttcctcggggtacttagatgtttcagttcccccggttcgcctcattaacctatggattcagttaatgatagtgtgtcgaaacacactgggtttccccattcggaaatcgccggttataacggttcatatcaccttaccgacgcttatcgcagattagcacgtccttcatcgcctctgactgccagggcatccaccgtgtacgcttagtcgcttaacctcacaacccgaagatgtttcacttcagagttgcgaaaatttgagagactcacgaacaactttcgttgttcagtgtttcaattttcagcttgatccagatttttaaagagcaaaacttcgcagtgaacctttgcaggtacactctgaagtattttttatttaatcactacagagatggtggagctatgcgggatcgaaccgcagacctcctgcgtgcaaagcaggcgctctcccagctgagctatagccccataacatgtagttaaaacctcttcaaatttgccgtgcaaatttggtaggcctgagtggacttgaaccaccgacctcacccttatcaggggtgcgctctaaccacctgagctacaagcctgtagaggttttactgctcattttcatcagacaatctgtgtgagcactgcaaagtacgcttctttaaggtaaggaggtgatccaaccgcaggttcccctacggttaccttgttacgacttcaccccagtcatgaatcacaaagtggtaagcgccctcccgaaggttaagctacctacttcttttgcaacccactcccatggtgtgacgggcggtgtgtacaaggcccgggaacgtattcaccgtggcattctgatccacgattactagcgattccgacttcatggagtcgagttgcagactccaatccggactacgacgcactttatgaggtccgcttgctctcgcgaggtcgcttctctttgtatgcgccattgtagcacgtgtgtagccctggtcgtaagggccatgatgacttgacgtcatccccaccttcctccagtttatcactggcagtctcctttgagttcccggccggaccgctggcaacaaaggataagggttgcgctcgttgcgggacttaacccaacatttcacaacacgagctgacgacagccatgcagcacctgtctcacggttcccgaaggcacattctcatctctgaaaacttccgtggatgtcaagaccaggtaaggttcttcgcgttgcatcgaattaaaccacatgctccaccgcttgtgcgggcccccgtcaattcatttgagttttaaccttgcggccgtactccccaggcggtcgacttaacgcgttagctccggaagccacgcctcaagggcacaacctccaagtcgacatcgtttacggcgtggactaccagggtatctaatcctgtttgctccccacgctttcgcacctgagcgtcagtcttcgtccagggggccgccttcgccaccggtattcctccagatctctacgcatttcaccgctacacctggaattctacccccctctacgagactcaagcttgccagtatcagatgcagttcccaggttgagcccggggatttcacatctgacttaacaaaccgcctgcgtgcgctttacgcccagtaattccgattaacgcttgcaccctccgtattaccgcggctgctggcacggagttagccggtgcttcttctgcgggtaacgtcaatgagcaaaggtattaactttactcccttcctccccgctgaaagtactttacaacccgaaggccttcttcatacacgcggcatggctgcatcaggcttgcgcccattgtgcaatattccccactgctgcctcccgtaggagtctggaccgtgtctcagttccagtgtggctggtcatcctctcagaccagctagggatcgtcgcctaggtgagccgttaccccacctactagctaatcccatctgggcacatccgatggcaagaggcccgaaggtccccctctttggtcttgcgacgttatgcggtattagctaccgtttccagtagttatccccctccatcaggcagtttcccagacattactcacccgtccgccactcgtcagcgaaacagcaagctgtttcctgttaccgttcgacttgcatgtgttaggcctgccgccagcgttcaatctgagccatgatcaaactcttcaatttaaaagtttgatgctcaaagaattaaacttcgtaatgaattacgtgttcactcttgagacttggtattcatttttcgtcttgcgacgttaagaatccgtatcttcgagtgcccacacagattgtctgataaattgttaaagagcagttgcgacgcggctttcagctcactgtcgcgaggtggcgtatattacgctttcctctttcagagtcaaccctgattttcaggatttttttctcttcgttgttccgaccatcctgtgaagtgtttcacgttgtcgtctcaacggaggcgcattatagggatcccaattttttgcacaagtatttttttgatctttttttctgtttgttgttttttcaccctttttgctgcaatcgcacacaaaacggtgcttttttgcatactaaaagacttgcacaaggccaataatgcccccaaagtcattagtaaatcatttattgctgaggtaagtatgtctgatgttttacgcccataccgcgatctttttccacaaatcggtcagcgcgtaatgatcgacgatagcagtgtcgtgattggtgacgttcgtctggctgatgatgtggggatctggccgctcgttgtgattcgtggagatgtacattatgtacagatcggagcacgcaccaatatccaggatggcagtatgttgcatgtcactcataaatcctcgtacaacccagatggcaacccattaaccattggcgaagatgtcactgttggtcacaaggtgatgctccacggctgcaccattggcaatcgagttttggttgggatgggctcaattttacttgatggcgcaatagtagaagatgatgtgatgattggtgcgggtagtctggtcccacaaaataaacggctggagagcggatatctgtatctcggtagccccgtcaaacagatccgcccgttaagtgatgaagagaaggctgggttacgctattccgcgaataattacgtgaaatggaaggacgaatatctggatcagggtaaccagacccagccttgatcatcttcactttgttcctgaattaagttttccgcttcttcttccaggtcccagcgatgctgacgaaaactcgctaaccactgttctggcgtatctccagtaaagcgatacgccagactctcgccagagatcgcgcatgtcagttgcataccattcacgagagcgggaaaacatacacattttttattctcgtcccactcttccctgtccggaaactggatggcctgattcacgcggacaattcctcctgcaattgctttataactggttctacgtcaggcagaacaccgtgccagagaagaaaggcatgagccgcctgtgccaccagcattcctaaaccatcagcattacgctttgagcctcgctgctcacaccatgccagaaaaggagtttttcctttctgatagaacatgtcatagcaataaatgcctggatgaatgagcgatgacgggatcgccggaatatcaccactgatgccactggatgttgcattaataatgagatcaaactcatgaccttccagttcgtccatactcaacgcctgaatactgccagtgtgcgcaaacaatttagccaactcttccgcgcgggataccgtccgattagttattgtcaccgcacagtccagggaaaggagtggcagtagtacgccgcgagatgctccaccagcgccgataagcagaatacgtaaaccagggcggataaaagacagacgttccagatcgcttaacaagcctacaccatcggtattgtcacccagcaggcgtccatcttctaaccgcatgagggtattaacagcaccagccaacgctgcccgttcagtaagctcatccgctctggcaaaagcctcttctttaaaaggcaccgtcacattcgcacctttaccaccagcactaaagaaagcgttcagtgtgttgatgaaatcattgatgggtgccaacacgcgcccatagggatgttcaatattcagttgctgagcaaattgctgatgaatgaatggcgatttgctgtgggctatcggattaccaaaaacagcataggtttccattatgttacccctgtcgaaacagttcacccgtcagggcatcgcggatttctgaaggatttaaacgcccccccgtttcaccaggcacaaccgggaacgccgcgccaaattgtgcgcgaacttcgtctactgttcgacaaggtggcaatccactcaagttggcactggtagaaaccagcggtttaccataagcctggcacaaagcaaccaccaacggatggtcggtgactcgtacagcaagcgaatcaaagcggcccgtcaaccagcgcggtgttgtcgcaggcgcgggaaagacaaaggtgacaggacctggccagcgggaaaaaatggtttcacgctgcacgtcagtcaacatggtgtcatcaatatagggtttaagctgctcgtaatttgctgcgattaaaatcagccccttatcaaccggacgctgttttaactccaacagtcgcatcactgctgtttcgctatcaggatcgcacccaacaccgaaaacggcttccgttggataggcgatgacacgttcttcattgagaacatctatcgcagctgcgatagcgtctctttgcaggttattattcacgttattattccgccgaaaccggctttccacattgtttactggcacaaaagtgttttacaccctgcgcggttttcttttcgatgagtagcggataatgacactcagggcattctccagctatgggtttgaagttaatggcaaattgacactccgggtagcgatcacaagagtgaaatgttttgccataacgggagcggcgctggaccagatggcccgtccgacattgggggcatgtaattgctgtttcgtccggtttatcgataagttcggtatgttcgcattcagggtagttaatgcaaccaataaacataccaaagcgtccctggcgtaataccagatttgcgccacatgcagggcaaacctgcccctccagaactttgacgatatgtccatccgctgaagatttcagaggacggacgtagtcacacgccggatactgtgagcatccaagaaacggaccgtgtttcccggatcgaataaccagttcagccccgcactttgggcaggactcattattacgcaccgtgaacagtgctgatttcgccataacaacttatgctgaattaaagaaatgattaatgcagcataccttcattcacttcaaagagtaattcttccatttgctggtacgcattttcgcagcccggaatattgaacaacaccatcaggatcacccatttcagatcatccagttcgaactctgcgttatccagcgcgagcactcgctctatcaccatttcacgagtttcaaggttgagcacctgaatctgctcaaggaaaagcagaaacccacggcagctggcatccagtcgttcacactcttccggtgtataaatacgcatggagagaggatccgaggccagttgcatcggttctgccaacccttcctgataatcagcaagtttttccagccatagcagggcattgtagatatcttctcgctcaaaacctgcgtcggtaagatcctgttcaagtttgtcttgatccacacgcaactcagcttctgtgtgaatataggtttcaaacaaatacattagtacgtcgaacatggcatgccctcctcaatcggacatagccgccgggtacagctgcgatccatcctgctaactccagttcgagtagttgagtaactacctctggcacaggttggccggcacgttcagcgacgacgtcaacaggtgttacctcatctcctacgttagccaggagctcaggaaatggcaatgccacgtcttgctgatctggtgaataaaatgaattttcaggggcgtctggcaaccagtgcaatccaaattgcaagttttccagaatttcttccggttccgtcacaagaatcgcaccttgttttattaaccagtgaggcccttcgcttcccggattccctattggacctggcaaggcaaaaacttctcgcccctgctcaagcgcacaacgtgctgtcaccagcgaaccactacgcaaagccgcttccaccaccagtacacctttacttagaccactgataatgcgatttcttcgtgagaaattgtaagcaaggggtggaacatcgaggggaaattccgagacgagagcgcccccctgttcaagcagactggcagccagtcgggcatgacggcggggatgaatggtattaagtccattccccaatacagcaatgctgacgccatttacctgtaaggctgctttatgcgctacaccatcgattccacgcgccagtccactcgtaattgtcactccacgcgtcgccagagtttcgcaaaataatcgtccccatcgctcgccataccatgaatgcgcccgactccccactacggcaagctgaaatgaatgcagcgcgtgcagttctccttcaacaaacagtgcgccggggtaatctgtcgtcgccagaagttgaggaggataaaattcgctgtccgcaggaattaaatgatggttgggttgctccaaccaacaaagtgagctttcgatactctttcgtggaaatgaaagaaagcgttgtgcctgccgcaatgtaagccctgtttgctgcaatacaaccgcatcaatatgcgactgttttgccacccagtgagcgatacggaccatatcatcgccgtacaagctgctgatactcattaaacgcagccaaatttctgtatcgaccatccttatctccctgccataagcagccttagcaatctttgcgattggtcagtgatgctgtcaatcagagggggatttgtctagaatagaagaaataatctttctaactcctgaacacatctctggagatttatgtcagttttgcaagtgttacatattccggacgagcggcttcgcaaagttgctaaaccggtagaagaagtgaatgcagaaattcagcgtatcgtcgatgatatgttcgagacgatgtacgcagaagaaggtattggcctggcggcaacccaggttgatatccatcaacgtatcattgttattgatgtttcggaaaaccgtgacgaacggctagtgttaatcaatccagagcttttagaaaaaagcggcgaaacaggcattgaagaaggttgcctgtcgatccctgaacaacgtgctttagtgccgcgcgcagagaaagttaaaattcgcgcccttgaccgcgacggtaaaccatttgaactggaagcagacggtctgttagccatctgtattcagcatgagatggatcacctggtcggcaaactgtttatggattatctgtcaccgctgaaacaacaacgtattcgtcagaaagttgaaaaactggatcgtctgaaagcccgggcttaaggataagaactaacgtgtcagaatcactacgtattatttttgcgggtacacctgactttgcagcgcgtcatctcgacgcgctgttgtcttctggtcataacgtcgttggcgtgttcacccagccagaccgaccggcaggacgcggtaaaaaactgatgcccagcccggttaaagttctggctgaggaaaaaggtctgcccgtttttcaacctgtttccctgcgtccacaagaaaaccagcaactggtcgccgaactgcaggctgatgttatggtcgtcgtcgcctatggtttaattctgccgaaagcagtgctggagatgccgcgtcttggctgtatcaacgttcatggttcactgctgccacgctggcgcggtgctgcaccaatccaacgctcactatgggcgggtgatgcagaaactggtgtgaccattatgcaaatggatgtcggtttagacaccggtgatatgctctataagctctcctgcccgattactgcagaagataccagtggtacgctgtacgacaagctggcagagcttggcccacaagggcttatcaccacgttgaaacaactggcagacggcacggcgaaaccagaagttcaggacgaaactcttgtcacttacgccgagaagttgagtaaagaagaagcgcgtattgactggtcactttcggcagcacagcttgaacgctgcattcgcgctttcaatccatggccaatgagctggctggaaattgaaggacagccggttaaagtctggaaagcatcggtcattgatacggcaaccaacgctgcaccaggaacgatccttgaagccaacaaacaaggcattcaggttgcgactggtgatggcatcctgaacctgctctcgttacaacctgcgggtaagaaagcgatgagcgcgcaagacctcctgaactctcgtcgggaatggtttgttccgggcaaccgtctggtctgatagtccactcttctaagcccggtcttgccgggcgtttttatacttatgaaaaaacaacgtaatttacgtagcatggcggcccaggccgttgaacaagtcgtcgagcaagggcaatcattaagcaacattctgccaccgctccagcaaaaagtttccgataaagacaaagcacttcttcaagagttgtgctttggcgtactgcgtacgctttcgcagttagactggctgattaataagttaatggcccgtccgatgaccggcaaacagcggaccgtgcattacctgattatggttggtttgtatcaactgctttatacccgcattccacctcatgctgcgctggctgaaacggttgaaggcgctatcgcaattaagcgtccgcaacttaaagggttgataaacggtgtattacgccagttccagcgtcagcaagaagagttattagccgagtttaatgccagtgatgcacgttatctgcatccttcctggttgctgaagcgtctgcaaaaagcgtatccagagcagtggcaatccatcgtcgaagccaataaccagcgtccgccaatgtggctgcgtattaatcgtacgcatcattcccgcgacagctggcttgcattgctggatgaagcaggaatgaaaggtttcccgcatgcggattaccctgatgctgtacgtctggaaacacctgcacctgttcatgcgctacctggttttgaagacggatgggttaccgttcaggatgcatcagcacaaggttgcatgacctggcttgcgccacaaaacggtgaacacattttggatctttgtgccgcccccggcggtaaaacaacgcatatccttgaggtggcaccagaagcgcaggttgttgcggttgatatcgacgaacagcgcctctctcgggtttacgacaatttaaaacgccttggtatgaaggcgaccgtgaaacaaggtgatggccgttacccttctcaatggtgtggcgagcaacagtttgatcgcattttattagatgcgccttgttcagcaaccggtgtgattcgtcgccatccagatattaaatggttacgtcgcgatcgcgatatcccggaactcgcgcaattgcagtctgaaattctcgacgccatttggccgcatttaaaaaccggtggaactctggtctatgccacctgttcggtgttaccggaagagaatagcctgcagattaaagcctttttgcaacgtaccgctgatgccgaactttgcgaaacaggaacaccagagcaaccgggtaaacaaaatctacctggtgccgaagagggcgacggcttcttttacgctaagctaatcaaaaagtgatgagataacgggtcgcgactgatgaaaattatcattctgggtgccggccaggttggcggcacactggcggaaaacctggttggcgagaacaacgatattactgttgtcgataccaacggtgagcgtctgcggaccttacaggataaatttgacctgcgggtcgtgcaggggcatggctctcatccacgcgtattgcgggaggcaggtgccgacgacgccgatatgctggttgctgtaaccagttcagatgaaaccaatatggttgcctgccaggtagcctactcacttttcaacacccctaatcgcatcgctcgtatccgctcaccagactacgtgcgcgatgccgataagctatttcattcagatgctgtgccgattgatcatctgatcgcaccagagcagttggttatcgataatatttaccgactgattgagtatcccggcgcattgcaggtggtgaacttcgctgagggtaaagtcagcctggctgtggttaaagcctattatggcggcccgctgattggtaatgcactttcgaccatgcgcgaacatatgccacatatcgatactcgtgtggcagcaattttccgccacgatcgccccattcgtccgcaaggttcgaccattgttgaagctggtgatgaagtgttctttattgccgcttcacagcatatccgcgcggtgatgagtgaattacagcgactggaaaaaccgtataagcggatcatgctggttggtggcggtaatatcggtgcagggctggcgcgtcgtctggaaaaagattacagcgttaaactcatcgaacgtaatcagcagcgcgctgccgaactggcggaaaagttacagaatacgatcgtcttttttggtgatgcgtcggatcaagaactactggccgaagaacatatcgatcaagttgatctgtttattgccgtcaccaacgatgacgaggccaatatcatgtccgccatgcttgccaaacgtatgggtgcgaaaaaggtgatggtattgatccagcgtcgcgcttatgtggatctggttcaggggagcgttatcgatattgcgatttcaccacaacaagcaactatttctgcgttgcttagccatgtgcgaaaagcagatattgttggtgtttcctcattgcgccgcggcgtagcagaagctattgaagccgttgctcacggtgatgaaagcacctcacgcgttgtcggcagagtcattgacgaaatcaagctaccgccaggaacgattattggagcggtggtacgtggaaacgacgtgatgattgccaatgacaatctgcgcattgagcaaggcgatcacgtaattatgttcctcacagataaaaagtttattaccgacgtcgaaagactcttccagccaagccctttcttcttgtaattaataaggcgtctaatgacgccttattatttccctttgattatcaaggattaattaaattcattcctggcaggaaaatggcttaacatttgttagacttatggttgtcggcttcatagggagaataacatgagcattattaaagaatttcgcgaatttgcgatgcgcgggaacgtggtggatttggcggtgggtgtcattatcggtgcggcattcgggaagattgtctcttcactggttgccgatatcatcatgcctcctctgggcttattaattggcgggatcgattttaaacagtttgctgtcacgctacgcgatgcgcagggggatatccctgctgttgtgatgcattacggtgtcttcattcaaaacgtctttgattttctgattgtggcctttgccatctttatggcgattaagctaatcaacaaactgaatcggaaaaaagaagaaccagcagccgcacctgcaccaactaaagaagaagtattactgacagaaattcgtgatttgctgaaagagcagaataaccgctcttaacaagcgcctgaaagcagaagaccagtggtaaaaaagtgatttactttcttgccactggcctcccagttcccccgattgccatgttttccttttcgcatgtaactgcctttccccttcttatttttctctacgcgctgtcggaataagggatcatgtagtaatgcttctatcgcattatcctttatctgccctttagtatgctgatatcgactcataaaaactccagttggttatttaacggcgcgagtgtaatcctgccagtgcaaaaaatcaacaaccactcttaacgccactcgccccttgttcaagagcttcaagaatcgaacaataaacactgctatgagcagtcccacaacaggcatcgttaaggcgttgcaaggaacgctgcatactctgcaactcggctatccgtgcttcgacttcctgcaatctttcctgcacaatgccttttgactcctgacaggtatggtgttcaggatcgatgcggatcgacagcaactcgcggatcgactccagactgaaacctagttgtctggcatagcggataaatttcaatcgctggagatcgctttcggtatataggcgaaacccaccttcagtacgcacttcatgctccatcatctgctgtttttcgtaataacgaatcgtgtcgggtgttacttccgccatttttgccagctcaccaatgcgatacatacatactccactagttatcgttgattttgtccaacaacttgtcagcataatcgccgcgtaaaaaatcggtactcaatccagcttgtcgcagcttcaattccagtaatgacaatcgacggctaacctcttgatattgcggatcatcgtgacggatacctttgagaatatccagaagctgaattgcttctctccgttgctcaagttctggcggtaagcaaccggcattcttcagcaagcgataccccgcacgtaattccggtggcacgtgagaatcatcatccagtatcaatggttcgccgctacctgccaggttatcaaactcacctttcgcttgcgcttctgctatatggcgctctgcccactggtcaagtaaccacataaatactccaggggatgaacaaaaagagtacagctattgtagataagtggggatactacgggtataaaaaaacccgccggggcgggtttttttacgttgcttcagattactctgcagcagcttctgctttctctgaacgatcaaccagctcgatgtaagccatcggcgcgttgtcgcctgcacggaagccacacttcagaatacgagtgtaaccaccggcacggctcgcgaaacgcgggcccagttcgttaaacagttttgccacgatctcgttatcacgagtacgggcgaatgccagacgacgattagcaacgctatcagtcttggcaagagtaatcagcggctcaactacgcggcgcagctctttcgctttaggcagagtcgtcttgatgatttcatgacgaaccagtgaacctgccatattgcggaacatagcctggcgatggctgctgttgcggttcagttgacgaccactcttacgatggcgcatgaccttatccttctcagtaaaaccttaacctgtgatccggttactcgtcagcgatgcttgccggtggccagttttccaggcgcatgcccagagacagtccacgggaagccagcacgtctttaatctcagtaagagattttttaccaaggttaggcgttttaaggagctcaacctcggtacgctgtaccagatcaccgatatagtggatagcttctgctttaaggcagttagcagagcggacagtcaattccagatcgtcaacagggcgcagcaggatcggatcgaactctggtttctcttctttcacttcaggctgacgtacatcacgtaagtcaacgaaagcttccagttgttcagccagaatggttgccgcacgacgaatcgcctcttcaggatcgattgtgccgttggtttccatttcgatgaccagcttgtccaggtcggtacgctgttctacacgcgctgcttcaacattgtaggcaatacgctccacagggctgtagcatgcgtcgaccagcagacggccgattgggcgctcatcttcttccgaatgaattcgggtagaagccggcacataaccacgaccgcgctgaactttgatacgcatgctaatagacgcgttctcatcggtcaggtggcagatcacgtgctgcggcttgacgatttcgacatcaccgtcgtgggtgatatcggctgcagtcacagggccaatgccagatttattcaaggtaagaataacttcatctttgccctgaactctcaccgccagccctttcaggttgagcaggatttccaggatatcttcctgaacgccttctttggtgctgtactcatgtagtacaccatcaatctcaacctcggtcaccgcgcaacccggcatcgatgagagcagaatacggcgcagtgcgttacccagagtatggccaaagccacgctctaaaggctcaagggtcaccttggcgtgcgtcgaactcacttgctcgatatcaaccaggcgcggttttagaaactctgtcacagaaccctgcattgtgtcctctctttggtactaagctttacttggagtaaagctcgacgatcaggtgttcgttaatgtccgcagacagatcagaacgctccggcttacgcttaaacgtaccttccatcttgccagcatcaacttccagccaggttggcttttcacgctgctcagccagctccagagcggctttcacgcgagactgcttcttcgctttctcacgaatgcttacaacgtcattcggactaacctgataagaagcgatgttaacaacacgaccgtttaccataattgctttatggctaaccagctgacgtgcttctgcacgagtggcaccgaagcccatacggtatacaacgttgtccagacgaccttccagcagaaccaacaggttttcaccggtgttgcctttcagacgtgctgcttctttgtagtagttacggaactgacgctccagcacaccatagatacggcgaactttttgcttttcacgcaactgcacaccatagtcagacagacgcggtttacgcgcaccgtgctggccaggagcttgttcaattttacacttggtatcgatcgcgcgaacgccagacttaaggaataagtcggtgccctcacgacggctcagcttgagcttaggacccaaatatcttgccattttctttctccaacaaacctggaaaacgaggcgttatacgcgacgttttttcggcggacgacaaccgttatgagggatcggagtcacatcagtaatgttagtgatgcggaaacctgcggcgttcagagcacgaatagtagattcgcggcctggacccggacctttaaccataacttccagattcttgatgccgtattctttcacggcgtcagcgcaacgctctgctgcaacctgagctgcaaacggagtggatttgcgagaaccacggaaaccggaaccaccggctgttgcccaacccaacgcgttaccctgacgatcagtgatagtcacgatggtgttgttgaaagaagcatggatatgagccacgccgtcagagacttgttttcttacacgtttacgtgcacgaattggtgcctttgccattattcaatcaccccgattatttcttgatcggtttgcgcggccccttacgggtacgtgcgttggtcttggtacgctgaccgcgaaccgggagaccacgacgatgacgcaaaccgcgatagcaaccaagatccatcaggcgcttgatgctcatgctgatttcacggcgcagatcaccttcaacgacaaatttggcaacttcgtcacgcagcgtgtcgatttgtccttcagacagctcactgatcttaacatcttcagcgatacccgctgcagccaggatggctttagaacgggtcttgccgacgccataaatcgaagttaatgcgattacggcatgcttatgatcaggaatgttaatgcctgctatacgggccactatgcactcctactatttaatatgtacgttccatgctgaaaagcccgttttcaggatactcaaatggaaacgcacagacatacaaaagattggctggctaatctagccagctcaacccaactttgcaagaaaaatatgcgaaaaaatcagccttggcgctgtttatgcttcggctcggcactgcaaatcacacggatgacaccatcacgcttaacgattttgcagttacggcataatttcttgacggaagcacgaactttcatttttactctccgtaacttctcgggcgaccaattatcggccgtagcctttcaggttcgccttcttcaatgcagactcatactgactggacatcatcagagtttgcacttgagccataaagtccataatcacgacaacaacgataagcagtgaggtcccaccgaagtagaacggtactttcattgcatcacgcatgaactccgggatcaggcagataaaggtaatatacagcgcaccaaccagggtcaggcgggtcattactttatcgatatacttcgccgtttgctctcccggacgaattcctggtacaaatgcaccggacttcttcaggttatctgctgtttcacgcgggttgaaaaccaacgccgtgtagaagaaacagaagaagatgattgcagacgcatagagtaacacataaagcggttgcccaggctgcaaatacagcgaaattgttgtcagccagttccaaccagtaccgcccccgaaccatgacgcgatggtcgccgggaacagaataatactggaagcgaagattgccgggattacccccgccatattcactttcagcggtaaatgtgtgctctgtgcagcatagacacgacgaccttgctgacgtttcgcgtagtttaccacaatgcggcgttgaccacgctcaacaaatacaacaaagaacgtcactgcaaatactaatactgcaaccaacagcaacacgaggaagtgcaggtcgccttgacgcgcttgctcgatagtatgggcaatggctggcgggagtcccgcgacaataccggcgaagataatgattgaaataccgttgccgatacctcgttcagtaatctgttcgcccaaccacatcaggaacatggttcctgtgaccagacttacaacagcggtgaagtagaatgcaaagcccgggttaatcaccaggccttgcataccaggcatattcggcagaccggtagcaataccgatcgactggaatattgccagcaccagagtaccgtagcgggtgtactggctgatcttacgacgaccagactccccttctttcttaatttctgccaacgttgggtgaaccaccgtcagcagctggataatgatcgacgccgaaatatacggcatgatccccagagcaaagatagaagcacggctgagagcaccaccagagaacatgttaaacatctcaatgatggtgcctcgctgttgctcaagcagtttggcaagtacagcggcatcaataccagggatcggaataaaagagccaatacggaacacaatcagcgcaccgataacaaacagcagtctgcgtttcagctcgcctaagccacctttggcactttgaaaatctaatcccggttgtttagccatctgctacttattcctcgattttaccgccagcagcttcgatagcagcacgagcgcctttagtaacacgcaggccacgaacagttaccggagtcgttacttcgccagccaggatcactttcgcgaactcgatctggataccgataatgttagccgctttcagcgtgttcaggtctactacaccgccttctactttagccaggtcagacagacgaatttcggctgtaatcgctgctttacgagaagtgaagccgaatttcggcagacgacggtacagaggcatctgaccaccctcgaaaccgcgacgtacgccaccgccagaacgagacttctgacctttgtgaccacgaccaccggttttaccgaggccagaaccgataccacgacccaggcgtttacccgcctttttggagccttcggccggagacagagtatttaaacgcatctcttactcctcaactttaaccatgaaggaaaccgcgttgatcataccgcgaatagcaggagtatcctcgcgctctacggtgtgaccaatacgacgcagacccaggccaagcagcgttgccttgtgtttcggcagacgaccgattgcactgcgggtttgagtaattttaatagtctttgccatggtttatttccccagaatttcttcaacggatttaccacgcttggcagcgaccatttctggagaattcatattttccaggccatcaatagttgcacgaaccacgttgatcgggttggtggaaccataggctttagccagaacgttatgaaccccagcgacttccagaacggcgcgcattgcaccaccggcgatgataccggtaccttcggaagccggctgcatgaatacgcgagaacccgtgtgaacacctttaacagggtgttgcagagtgccgttattcagcgcgacgttaatcatattgcgacgggctttttccatcgctttctggatcgctgctggaacttcacgcgctttaccgtaaccaaaaccaacgcgaccgttaccatcgccaactacagtcagagctgtgaaggagaaaatacgaccacctttaacggttttagatacgcggtttaccgcgatcagcttttcctgcagttcgccagcttgtttttcgatgtgagccatcttacacctctaccttagaactgaaggccagcttcacgggcagcatctgccagtgcctggacacgaccatgatattggaacccggaacggtcaaaggatacatctttgatgcctttttccagagcgcgttcagcgacagctttacccacagctgcagccgcgtctttgttaccggtgtacttcagttgttcagcgatagctttttctacagtagaagcagctaccagaacttcagaaccgttcggtgcaattacctgtgcgtaaatgtgacgcggggtacgatgtaccaccaggcgagttgcgcccagctcctggagcttgcggcgtgcgcgggtcgcacgacggatacgagcagatttcttatccatagtgttaccttacttcttcttagcctctttggtacgcacgacttcgtcggcgtaacgaacacccttgcctttataaggctcaggacgacggtaggcgcgcagatccgctgcaacctggccgatcacctgcttatcagcgcctttcagcacgatttcagtctgagtcggacattcagcagtgatacccgcaggcagctgatggtcaacaggatgagagaaacccagagacaggttaatcacattgcctttaaccgctgcacggtaacctacaccaaccagctgcagcttcttagtgaagccttcggtaacaccgataaccattgagttcagcagggcacgcgcggtaccagcctgtgcccaaccgtctgcgtaaccatcacgcggaccgaaggtcagggtattatctgcatgtttaacttcaacagcatcgttgagagtacgagtcagctcgccgtttttacctttgatcgtaataacctgaccgttgatttttacgtcaacgccggcaggaacaacgaccggtgctttagcaacacgagacattttttcctccgattaggctacgtagcagataatttcgccaccaagaccagcctggcgcgctgcacgatcagtcataacacctttagaggtagaaacaactgcgatacccagacccgccataactttcggcagctcatctttacgtttatagatgcgcagacctgggcggctgacacgctgaatgctttctacaacagctttgccctggaaatacttcagagtaagttccagttcaggcttggtgtcgccttcaactttaaaatcttcaataaaaccttcttccttcagcacgttggcgattgccactttcagcttggaggaaggcatggtgaccgcagctttgttcgcggcctgaccgttacggatacgggtcagcatatccgcgatcggatcttgcatgctcatctgtctttactcccgtgattcaattggtgacaattaccagctagcctttttcagacccgggatttcaccgcgcatagcggcttcacggaccttaatacggctcaacccgaacttccgcaggaaaccatgcggacgacctgtttgacggcagcggttacgctgacgagacgggctggaatcacgcggcagagtctgcagcttgagaacagcgttccaacgatcttcgtcggaagcgttcacatcagagatgatcgctttcagttcagcgcgtttcgcgaagtatttatcagctaaagctacgcgttttacttcgcgtgctttcattgattgcttagccatttagtaaccctaccttacttgcggaacgggaagtcaaaggcagccagcagagcgcggccttcttcgtcagatttcgcagtagtggtaatggtaatatccaaaccacgaacgcggtcgactttatcgtagtcgatttctgggaagatgatctgctcacggacacccatgctgtagttaccacgaccgtcgaaagacttagcggacaggccacggaagtcacggatacgaggtacagcaatagtgatcaggcgctcaaagaactcccacatgcgttcgccacgcagagttactttacagccgatcggatagccctgacggattttgaagcctgcaacagatttgcgtgctttggtgatcagcggtttttgaccggagattgctgccaggtctgctgctgcgttatccagcagttttttgtcagcgatcgcttcaccaacacccatgttcagggtgatcttctcgacccgagggacttgcatgacagaattgtagttaaactcagtcatgagttttttaactacttcgtctttgtagtaatcatgcagtttcgccatcgtactactccaaattacttgatagtttcgctgttagacttgaagaaacggacttttttaccgtcttcgaatctaaagcctacacggtcagccttgccggttgccgcattgaagattgctacgttggaaacctgaatagcggcttctttttcaacgatgccacccggttggttcagggccggaaccggcttctgatgtttcttaaccaggttgataccttcaacaatgaccttgccggaagacaggacattcttaactttaccgcgtttacctttatctttaccggttaacacgataacttcgtcatcacgacggattttcgctgccatgattcgctccttagagtacttctggtgccagagagataattttcatgaacttctcactacgaagctcacgagttaccggcccaaaaatacgcgtaccgataggctgctcgctgttgttgttcagaagaacacaagcattaccatcgaagcgaatgacagaaccgtccgggcgacgaacacccttcttggtgcgcaccactaccgccttcagcacatcaccttttttgaccttaccacgcggaattgcttctttgatggtgatcttgatgatgtcgcctacgcctgcgtagcgacggtgcgagccacccagaaccttgatacacattacgcgacgtgcaccggagttgtcggcgacgttcagcatagtctgttcttggatcattttagtgctccgctaatgtcaactactactgagacccgaaaatcaggtcgttaaaaatccccatatcgagggcgcggcattataacaccgcttcaaggatatgggtagaaaaaataaacggctcatttctgagccgtttattcgtattgagagagtgtactgtattacagaaccgctttctctacaacgcgaaccagcgtccaggatttagtcttggacagcggacggcattcgcggatttcaaccacgtcaccgataccgcattcgttgttctcgtcatgtacgtgcagtttggtcgtacgcttgatgaatttaccgtagatcgggtgtttcacaaaacgttcgatagcaacaacaatggatttctccattttgtcgctaacaacgcgaccttgcagagtacggattttatcggtcattacgcacccgccttctcgttcagtaaagtcttaacgcgtgcgacatcgcgacgcacttgcttcaacaggtgagactgttgcagctggccacttgcagcctgcatacgcaggttgaactgctcacgcagcaggttcagcagctcggtgttcagctcttcaacgctcttctcacgcagctcttttgctttcattacatcaccgtcttagttacaaaggtggttttaatcggcagtttcgctgctgccagcttgaatgcttcacgggccagctcttccggaacaccgtccatttcatacaggactttacccggctgaatcaaggcaacccaatactccacgttacctttacctttacccatacgcactgccagcggcttttcagtgatcggtttgtccgggaacacacggatccagatcttaccttgacgcttaactgcacgggtcatagcacgacgtgctgcttcgatctgacgggcagtcagacgaccacggccaacagctttcagaccgaagctgccgaagctaacatccgtaccctgcgccagaccgcggttacggcctttgtgcattttacggaattttgtacgctttggttgtaacatcagcgacgctccttatttacggcctttacgctgctgctttttaggctgagcagccggtttttccggttgttcaacagcagccataccacccaggatctcgcctttgaagatccacactttaacgccgattacaccgtaagtggtgtgcgcttcagaggtgttgtagtcgatgtcagcacgcagagtgtgcagcggtacgcgaccttcgcggtaccattcggtacgtgcgatttccgcgccgcccagacggccgctaacttcaactttaatacctttagcgcccagacgcattgcgttctgtacagcacgcttcatagcacgacggaacataacgcgacgttccagctgagaagtgatgctgtcagcaaccagttttgcgtccagttcaggcttacgaacttcggcgatgttgatctgtgcaggaacgccagcgatgtccgctacgaccttacgcagtttttctacgtcttcaccttttttaccgataacgatacccgggcgagcagtgtgaatggttacacggatgctcttagccggacgctcgataacgatacgagatacggacgctttagccagttccttagtcaggtactgacgtactttaaaatcgctgtccaggttgtcagcgaattctttggtgttcgcaaaccaggtagagttccatggttttacaatacccaggcgaataccattaggatgtactttctgacccattgctagtctccagagtctcagcgatcggacacaaccacagtgatgtggctggtgcgcttcaggatgcgatctgcacgaccttttgcacgcggcataatgcgcttcatgctcgggccttcgtctacgaaaattttcgtaactttcagatcgtcaatgtcagcgccatcgttgtgttcagcgttagcaatggcagattccagaactttcttgaccagtacagccgctttcttgttggtgtaggtcaaaatatccagagcctgcgacactttcttaccgcgaatcaggtcagcaacaaggcgaaccttctgagcagaagaacgagcatggcgatgtttagcgatagtttccatctcttcctcctaccttatttcttcttcgcttttttatcagcagcgtggccgcgataagtacgagtcggtgcgaattcacccagtttgtgaccaaccatttcgtcggttacaaataccggaacgtgctgacgaccattatggacagcgatggtcaaaccgatcatgttaggaaagatcgttgaacgacgggaccaagtgcgcaggggcttcttgtctccgctttccaccgctttctctaccttcttcagcaagtgcaggtcaataaaaggacctttcttgagagaacgtggcatggcttatcctctaaaattatttgctacggcgacgtacgatgaatttatcagtacgcttgttgctgcgggtcttcttacctttggtctgaacgccccacggagttaccgggtgcttaccaaagttacgaccttcaccaccaccatgtgggtggtctaccgggttcatcgcggtaccgcgaacggtcggacgaacaccacgccagcgtgcagcacctgctttacccagaacgcgcagcatatgctcagcattgccaacttcgcccagagttgcacggcagtctgcttctactttacgcatttcaccagaacgcagacgcagggtgacataagcaccatcacgagcaacgatctgaacgtaagtaccagcggaacgtgccagctgaccgcctttacctggtttcatttctacgttatgaacagtagaaccaaccgggatgttgcgcatcggcagggtgttacctggtttgattgcagcatcaacgccagactgaatctggtcgccagctttcaggcctttaggggccaggatgtaacggcgttcaccgtctttgtacagaaccagcgcgatgttcgcggaacggttcggatcgtactcaagacgttcaacaactgccgggataccgtctttgttgcgtttgaagtcaacaatacggtaagcctgcttgtggccaccaccgatatgacgagtggtgatacggccattgttgttacgaccaccggatttgctgtttttttccagcaacggagcaaaaggtttgcccttgtgcagctcagggttaaccactttaactacgtggcgacgacccggagatgtcggtttacatttaacaactgccattgtattactcctccgacttactcagcgccgccaacgaagtccagattctggccttctttcagggtgacgtaagcttttttccagtcgctacgacgaccgatacgctgtccgtgacgtttaactttccctttaactaccagggtgttaacgacttcgacttcgacttcaaacagtttctgcacagcagctttgatttctgctttggtcgcgtctttagcaactttgagtacgatggtgttggatttttccatcgcagtagacgctttttcagaaacgtgcggtgcacgcagcaccttcagcagacgttcttcacgaatcatgccagcatctcctcaacttgcttaacagcatcagcagtcattacgactttgtcgaaggcgatcaggctaaccgggtcgataccagttgcatcgcgtacgtcaaccttgtgcaggttgcgcgcagccaggaacaggttttcgtccagctcaccggtgatgatcagcacatcttccagagccatgtctttcagtttctgtgccagcagcttagttttcggcgcttctacagagaacttctcgacaacgatcagacgatcctgacgtaccagttcggacaggatgcttttcagcgcgccgcggtacatcttcttgttaactttttgactgtggtcctgcggacgagcagcaaaggtcacgccaccagaacgccagatcgggctcttgatagaaccagaacgcgcacggccggtgcctttctggcgccacggttttttaccggaaccagttacttcagcacgagtcttctgagcacgagtaccctgacgagcaccagctgcataagcaacaacaacctggtgaaccagcgcttcgttgaaatcacgaccgaaggtagtttcggaaacagtcagcgcgctctgcgcgtctttcaatactaattccattgctatctccttacgccttcacagctggtttaacgatcaggtcgctaccggttgcacccgggacagcacctttaaccagcagcaggttgcgctcagcgtcaacgcgtactacgtcaaggctctgaacggttacacgttcgttacccatctgacctgccattttcttgcctttgaacactttgcccggagtctggttctgaccgatagaacccggaacgcggtgagacaaggagttaccgtgagtagcgtcctgggtacggaagttccagcgcttaacggtacctgcgaaacctttacctttagaggtgccagttacgtcaacttttttaacgtcagcaaacagttcaacgctaatgctctgacctacagtgaactcttcgccttcagccaggcggaattcccacagaccacggccagcttctacgccagctttagcgaagtggccagcttcaggcttggtcacacggttagcttttttagcaccggtggtcacctgaatagcacggtagccatcgttagccaggtctttaacctgagtaacgcggtttgcttcaacttcgattacggttactgggatagaaacgccgtcttctgtgaagatacgggtcatacccacttttttaccgactaaaccaatcattgtttcaacctctcaatcgctcaatgacctgattaacccaggctgatctgcacgtctacaccggcagccagatccagacgcatcagagcatcaacggttttctcggttggctcaacgatgtcaaccagacgcaagtgagtacggatttcgtactgatcgcgcgcgtctttgttgacgtgcggggagatcagaacagtgaagcgctctttgcgtgtcggcagcgggatcggaccacggacctgcgcaccagtgcgcttggcagtctcgacgatttccgcggttgcttgatcgatcagacgatgatcaaacgctttcaggcggatacggattctttggttctgcatgagaccagagctccaattattttataaacgaaaatgattactcctcagacccattacgattgatgggagagtgtaaccgttcttacgtagctccccgattgggagcattgttaggtagccaaattcggctaactgaggttcagattgaacctgctgtcaactacgacaagcccgcgcattatacatacttaaccaccgaacgcaagcgtattgctagtaaagtaaacagccttcgggttatctctcaagttcgttcagtgcatttttgacacgctctcttaaaccggctttctcttcgctttcttccacagtattttcttcgtcttcagaagaagagggggcattctcaaccgcgacgcctgggtcatcttcctcctcgacggattcgacgacggggagtggctgttttttgaagaaatagtgttgtgttgattgtttaaaagcgggcgtttcagcctctacagtgacttcggcttttactatccaaagcacccatagctgcctggcatacccaccaaccagcaccattcctgcaaaccacaggcaaatcagtaataaacaaattacatatattatggtgctgtgtttttgtcgggagaagataccagggtgacctgtttctttctgctcacgcgcggcgatatagaattcaaacatgtcatttccccttcactgttgtttccggggaaatatttgcttcatcccgatataagtaggcactctcccctgccacctgccagagatgtactaacgttgaaaagccaacaacaccgtcagttttcaagtggtggcttttttgaaattgctttattttttctaccaacaagggacgccactccgccgaaggttctgtcgaaatatgcaatgcgcggtttaacatcgtttccagccagagaatctcttcctcgctgctatcacgcgtaatggtactctccccttccggcgacattttccacaacagaagataatcacccgtccataccgactcaaaccatttatgtgtcagcgtccacgtttgctgacctacgaggacatcaacgctagcctcaccgacgcgaacgaccacaacaggcaattttttgtccccgactttaagcgatgcgatccagggcaaattctgatctaccaatgtttgtaaagaagcattcccacttttacatgccagccccgctcttactgcctgatcgcaccaggccgaatcagctgggacctcgtacccccatacgccgtataacacgcttagcgcctcactatcgcgcatcaccacatgagcaatatccttagtcatatcttgtttaactactggcgttacgggtatcagccacgcaggaacgggtaacgtagctgtaaaagaggacagcagtagccaaccacaggtaagagcgataatggttccactcatcaccacggcaagctgcattttccgggggcggttatcacccaatatgcggtaaatcattcgccattgttttgctgtgaaaacgctggtctgctcggcttgctgtaataagcgaattgtttcgccggcaagcgccagctttctgcgatcgccccgacataataaagctatccgtttcagaactctggcggttaaaaggagatcgggttggtcaatattctgaccttcaaggatgcttgccttaagttcgtgctccgtcagacgtcctatcgagacaagttcaatgccctgttttttaaaatcacgttcgacttttcgatcgggtctgccgatcagcaaaaattgaccgtcaggaataagagatattgcgcgttggagatcatcaagtatgcggcggtgattcaggtgagcattttcaataataataagagggcagcgactatcagttcgatgaagcgcatgcagtaattgccccgccatctcatctcgcgtccaggcgctgtcacggcagccctgttcagccgcgttatcgtcggtaacgatccatgcggccttaccttgccaggaaacaacgaggcttaaagtaatcacacggcgatgtttatctttttgcagttgctgcgccagccaggtttttccacttccagcctcacccaacaaatagcatagacgccaggtttgacgtttctcacacaaccaggaaagaataacttctcttctcgtagacatagaacttcctgttttaattattgattatccttaatcataaaaataatgtatgtatttattaattaaatacatattactaatataaataaattttgtttgattcatgcaagcggcattaatactatttatactaacgtcaatatacaacccacccaatctattttattagaacatacatcgtgcccacactacgtttccccttccatctggcgaatcataataaagatgctgccatcaatatattgattatatttataagcatagggtcgattatttttaatgtgaattatttccatacaactatagttaaaaatggacagatcattaatcaaccaacaaacgcatttcagtctgatttcagccttgccgctttatggcgtaacgaaaatcatgctggggtaaaagatgcaaatcccgtggcagttaatcaggaaacacctaagctctctatagcgcttaatggcattgtactcacatcgaatgatgagacttcttttgtcttaattaatgaggggagcgaacaaaagcgatactccctcaacgaagcccttgagtcagcgccgggaacgtttattagaaaaataaataaaaccagcgttgtgtttgaaactcacgggcattacgaaaaagtaactctccatccagggctacctgacatcatcaagcagcctgattcagaaagtcaaaatgtactcgctgattatattatcgccacgcctatacgtgatggagaacagatatacgggcttcgattgaaccctcgtaagggcctcaatgcatttaccaccagcttgctacaaccaggggatatcgccctcaggatcaataatctttcgctgacccaccctgatgaggtttcacaggcattaagtttactgctaactcaacaaagtgctcagtttacaattcgtcgcaacggcgtaccccgcttgataaatgtttccgtcggggaacttacaggaatgaatggactgcgtcatgaaaggactcaataaaatcacctgctgcttgctggcagcactactcatgccttgtgcaggacacgctgagaacgaacaatacggcgcgaacttcaataacgccgatatccgccagttcgtggaaatagtgggtcagcatcttggcaaaacgatcctgatcgacccttcggtacagggaaccatttccgtacgcagtaatgatacgtttagccaacaggagtactaccagttctttttaagtattcttgatctttacggttattccgtgatcacgctggacaatggttttctgaaagtggttcgctcagctaatgtaaaaacatcgccagggatgattgctgacagttctcgtccaggcgtaggtgatgagttggtcacccgaattgtaccgcttgagaacgttcctgctcgtgacctggcccccctgctccgccagatgatggatgcgggtagcgtcggtaatgttgtgcattatgaaccctccaacgttcttattctgaccggtcgtgcctccaccattaataaactgattgaagtcataaagcgcgttgatgtcatcggcacagagaagcagcaaattattcatctggaatatgcgtcagcggaagatctcgccgagattcttaatcaattaatcagcgaaagccacggtaaaagccagatgccagccctcctctccgcgaagattgtggcggataagcgaaccaactctcttatcatcagtggaccggaaaaagcacgccagcgcatcacttcattactgaaaagccttgatgtcgaagagagcgaggaaggaaatacccgggtttattacctgaaatatgctaaagccacgaatctggtggaagtgctaaccggtgtttccgaaaagctgaaagatgaaaaagggaatgcgcgtaagccctcctcttctggcgcgatggataacgtcgccattaccgccgatgaacagactaactctctggtcattaccgctgaccagtccgtccaggaaaaactcgccacggtaattgcgcgtctggacattcgccgtgcacaggtgctggttgaggcaatcatcgttgaagttcaggatggaaatggactaaacctcggcgtgcaatgggcgaataaaaacgttggcgcacagcaatttaccaataccggattaccgatttttaacgctgcgcaaggtgtggctgattataaaaagaatggtgggatcaccagcgcgaatcctgcctgggatatgtttagcgcctacaatggcatggccgcaggcttcttcaatggcgactggggagtactgcttaccgcgctggccagtaacaataaaaatgacatcctcgccaccccaagcatcgtaacgctggataataaactcgcgtccttcaacgtggggcaggatgtgccggtgctatccgggtcacagaccacttcaggggataacgtctttaataccgtcgaacgcaaaacggtggggacaaaactcaaagttactccgcaggtcaatgaaggcgacgcggtgttgctcgaaatagagcaggaagtctccagcgttgactcttcctctaactcgacgctcggcccgacgtttaatacccgtactattcaaaacgccgtgctggtcaaaaccggtgaaacggtggtcctgggcggattgctggatgatttttctaaagagcaagtgtcaaaggttcctctgcttggcgatattcctttagtggggcaactcttccgctatacctccaccgagcgcgctaaacgcaacctgatggtatttatccgtccgacgattatccgtgacgatgatgtttatcgctcactgtcaaaagagaaatacacccgttaccgtcaggagcaacaacagcggatcgacgggaaatcaaaagcgctggttggctcggaagatttgccggtgctggatgaaaacacgttcaacagtcacgcccctgcgccatcgtcacggtgaggcattcatatgagaattcactcaccgtaccccgccagttgggcgctggcacaacgaattggttatctctattcagagggcgagattatttatctcgccgatacgccattcgagcggttactcgatattcaacgtcaggttggccagtgccagaccatgaccagcttgtcacaggctgattttgaagctcggctggaagcggtattccatcagaataccggtgagtcgcaacagattgcgcaggatatcgatcaatccgtcgatcttctctcgctttcggaagagatgcccgcaaatgaagatctcctgaatgaagattcagcggcaccggttatccgcttgatcaatgcgattttgagtgaggccatcaaagaaaccgcctctgatatccacattgaaacctatgaaaaaacaatgtcgatccgttttcgcatcgacggcgttttgcggacaattttacagccaaacaaaaaactggcggcactgcttatctcccgaattaaggtcatggctcgtcttgatatcgccgaaaaacgtattccacaggatggaagaattagtttgcgtatcgggcgacgtaacatagatgtccgcgtatccacactgccgtccatctatggtgaacgcgccgtactccgcctgctggataaaaacagcctccagctttcattgaacaacctggggatgacggcagcggataagcaggatttagaaaatctcattcagcttccgcacggtattatcctggtgacagggccgacaggctccggtaaaagcaccacgctctacgccatcctttcggcgctgaatactcccggccgcaatattctgacggtagaagatcccgtggaatatgagctggaaggcattgggcaaacgcaggtgaatacccgtgtggatatgtctttcgctcgcggcctgcgcgccatacttcgccaggacccggatgtcgtcatggtgggggaaattcgtgatacagaaaccgcgcagattgcggttcaggcctcgctcaccggccatctggtactctcaacactccacactaacagtgcatcaggcgcagtgacccggctccgcgacatgggcgtcgaatcattcctgctttcgtcttccctggcagggattatcgcgcaacgtctggttcgtcgcctgtgtccgcaatgccgacaattcacgcccgtatcaccccaacaagcgcagatgtttaaatatcatcagctcgcggtgacaacaattggcactcccgtaggctgccctcattgccatcaatccggctatcaggggcgcatggcgatccacgaaatgatggtggtgacgccggaattacgggccgctattcatgaaaatgtggatgaacaagcactggagcgactagtccggcaacaacacaaggccttaatcaaaaatggcctgcaaaaagtgataagcggtgacacctcctgggatgaggttatgcgcgtcgccagtgccacgctggagagcgaagcatgaattatcgctatcgcgccatgacccaggatggtcaaaaattgcaagggatcattgatgctaacgatgaacgtcaggcacgactgcggctgcgtgaagaagggcttttcctgctggatattcgcccccaaaaaagttcgggagtaaaaacacgtcgcccgaggatcagccatagtgaactgacgcttttcacccggcagttggcaaccttaagcgcagcggcattacccctggaagagagccttgccgtaatcggtcaacaaagcagtaataaacgactgggtgacgtgttaaatcaggtacgcagcgccatccttgaagggcatcccctttccgatgcattacagcattttcccacgcttttcgattcgctctatcgtaccctggtaaaagcgggcgaaaagagcgggctgctggccccggtgttggaaaagctggctgattacaatgaaaaccggcagaaaatccgcagcaagctcattcagtcactgatctacccctgtatgctcactacggtggcgattggggtcgtgattattctcctcactgctgtcgtgcccaaaattaccgaacagttcgtgcatatgaagcagcaactgccgctgagtacacgcattcttttaggtctgagcgacacgttgcaacgtaccggcccgacattattagcgacagtgtttattgtcgctgtaggtttctggctctggttaaaacgcggcaataaccgccaccgttttcatgccatgttgctgcgcgttgcgctcatcggcccgctgatttgcgccattaacagcgcacgctatctccgcactttaagtattttgcaatccagcggcgtccctctgctggatgggatgaatttgtccaccgaaagcctcaacaacctcgaaattcgccagcgtctggcaaatgcggcagagaacgttcgccagggtaacagcattcatctttcgctggaacaaaccgcaattttcccgccgatgatgctctacatggtggcctctggcgaaaaaagcgggcagctcggcacattaatggtcagagccgcagataaccaggagacactccaacaaaatcggatcgccttaacgctctccatcttcgagccagcactcattattacgatggcactgatcgtcctgtttattgtcgtgtcggtactccaacctcttcttcaacttaactcaatgattaattaaggaaagcatatgcgcgcaacggataagcaacgcggttttacattactggaaattatggtggtgatcgtcattatcggcgtacttgccagcctggtggttcctaacctaatgggcaataaagaaaaggcggataagcaaaaagccgtcagcgatattgtggcgctggaaaacgcccttgatatgtacaaactcgacaatcatcactatccaaccacaaatcaggggcttgaatccttagtagaagcgccgacactgccaccgctggccgcaaactataacaaggaaggttatatcaagcgtctgcctgccgatccctggggcaatgattatgtcctcgttaatcctggtgaacatggtgcatacgatctgctttcagcagggcccgatggtgaaatgggaaccgaggacgacatcaccaactggggtttgagcaagaagaaaaagtaagtcagcgatgaatcagcaacgcgggtttaccctgctggagatgatgctggtgctggcgctggtcgctatcacggcaagcgtggtgctcttcacatatggccgggaggatgtcgccagcactcgtgcgcgcgaaacagcggcgcggtttaccgctgcacttgaattagccatcgaccgcgccacgctcagtggtcagcctgtcggtatccatttctctgattcagcatggcgcattatggtaccgggcaaaacaccatcagcctggcgctgggttccattacaagaagatgccgcagacgagagccaaaatgactgggatgaagaactctcaattcatcttcagccatttaaacctgatgacagcaaccagccacaggttgtgattctggccgacggacaaatcacgcccttctctttgttgatggctaacgccgggaccggtgagccgctcctgacgttagtctgttcaggctcatggcccctggatcaaacgctcgccagagatacccgcccatgaacaaacaatcagggatgacactgcttgaagtcttactggcgatgagtattttcaccgctgttgctctgactttaatgagcagtatgcaagggcaacgaaatgccatcgagcgaatgcgtaacgagacgctggcattgtggatagcggataaccagcttcagtcacaagattcattcggcgaggaaaacacgtccagttctggcaaagagttaataaatggcgaagagtggaactggcgcagcgatatccactcaagcaaagacggcacgcttctggaacgcaccataacggtgacattacccagcggtcagacaacctcgcttacgcgttatcaaagcatcgataataaatccgggcaggcacaagatgattaatcgccagcagggtttcacattgctggaggtcatggcggcgctggcgattttctcaatgcttagcgtgctggcgtttatgattttttcgcaagcttccgagttgcatcaacgctcacagaaagaaatccagcagttcaatcagctacagcgcaccatcaccattcttgataacgatctcctgcaactggtcgcccggaggaatcggagtacggacaaaatcatggtgttgggtgaagaagctatttttaccacgcaaagtcgcgatccgctggctcctctcagtgaagcacaaaccttactcactgttcactggtatctgcgaaatcatacgctctaccgtgctgttcgtacttctgtggatggcaggaaggatcaacccgcccaggcgatgctggaacatgtcgagagctttcttctggaaagtaacagcggggaaagccaggaacttcctctctcagtcacgttacatctgcagactcagcaatatggggggttacagcgccgttttgcattacctgagcagttagcgagagaagagtcgccagctcagacgcaggccgggaataataaccatgaataatgaacaacgcggcgtcgcgctgctcattgtactcatgttactggcgctcatggctgctctggcagcagacatgacgctcagttttcacagccagcttcagcgaacccgccaggtaaaccatcatctgcaacggcaatatgatattgaactggcggagaaacttgcgcttgccagcctcacccaggacgttaaagataacgacagacagaccacgttgcagcagtactgggcacagccacaacagttgcagctggaagatggcaatacagtgaagtggcagttacgcgatgcccagcactgttttaatctcaatgcgttagcaaaaatctctgacgacccgctggcttcccctgatttccccgcccaggtattcagtgcgctgctgattaacgccggtatcgatcgcggaaacaccgatgagatcgtgcaatcaatcgctgactatattgatgtcgatgactcaccacgctttcacggcgcagaagatagcttttaccaaagccagacgccgccccggcatagtgccaatcagatgctttttctgactggcgaattacgtcagataaaaggcataaccgaaaacatctatcagcggcttatcccgtatgtctgcgttctcccgaccacggaacttagcatcaatcttaatatgctaacggagaacgatattccgctcttcagagcgttattcctcaataacatcacggatgctgacgctcgggtcttattgcaaaaaaggccgagggaaggctggctaaccacggatgcatttctttactgggcgcagcaggatttctccggtgtgaagccactggttgctcaggtgaaaaggcatctctttccctatagccgctattttacgctgagtacggaaagtatcagcgacgaacaatcccagggatggcaaagccatatttttttcaaccgtaaacagcagagcgcccaaatctatcggcgtacgctgcaactctactaatcataaggatcgtgatgcctgaatcgttgatggtcatacgttcttcctcgacgctgcgtaagcattgggaatggatgacgttctccgcagatagcgtatcttcggtacatacgctcacggacgatcttccgctggagtcgctggccgatcagcccggtgccggaaatgttcatcttttgatcccaccagagggccttttatatcgttccctcacgctgcccaacgccaaatacaaactcaccgcacaaacattacaatggctggcagaggagacgttacccgacaacacccaggactggcactggacggttgtcgataaacaaaacgaaagtgtcgaggtgataggcattcagtcggagaaactcagtcgctatcttgagcgtttacatactgccggactcaacgtgacgcgggttttgccagatggctgctatcttccctgggaagtagatagctggactctggttaaccagcaaacaagctggctcattcgcagtgccgcacatgccttcaacgaactggatgaacactggttacagcatcttgctgcccagtttccgcctgagaatatgctttgttatggtgtagtacctcacggcgttgcagcggccaatccacttatccagcatcctgaaataccatcactgagtttgtattctgccgatattgcattccagcgctatgacatgctgcatggtatttttcgtaaacagaaaactgtaagcaaatcgggaaaatggctcgcccgcctggcagtaagctgtctcgttctcgccattctttcttttgttggcagccggagcatcgcgctctggcatacgcttaagattgaagatcaacttcagcaacaacagcaagaaacctggcaacgttatttcccgcagatcaaacgcacccacaattttcgtttttactttaagcagcaactcgctcagcaatatcctgaagctgtgccgttgctctatcatttacaaacacttctgctggaacaccctgaactgcagttaatggaggcgaactatagccagaagcaaaagtcgctgaccttaaaaatgagtgctaagagtgaagctaatatcgatcgtttctgtgagttaacacagtcctggcttccgatggaaaaaacagaaaaagatccggtcagtggtgtatggacagtaaggaactcagggaaatgattaaatcatggtgggcagaaaaatccacatcggaaaaacagatcgttgcggcactggcggttctctcgctcggcgttttttgttggcttggggtgataaaaccgatagatacctacattgcagagcatcagtcccacgcgcaaaaaattaagaaggacatcaaatggatgcaggatcaagcgagcacccatggtttactcggtcatcctgcgcttacgcagcccatcaaaaatatccttctcgaggaagcaaaacgtgagaatttggctatcacgctggaaaacggcccggacaatactctgacaattcatcctgtcacagctcccctcgaaaacgtctcccgctggctcactacggcacaggtaacatacggtattgttattgaagaccttcagtttactcttgccggaaacgaagagatcaccctcaggcatttgtccttcagggagcaacaataatgacaatgctactgccgctcttcattctggttggttttattgcaggttattttgttaatgccatcgcctatcacctctcgccgttggaggataaaacggcgttaacgtttcgccaggtattggttcatttcaggcaaaaaaaatatgcctggcatgatacagtgcccctgatactttgtgttgctgctgctatcgcctgcgccctggcacctttcacgcccatcgtgactggcgcactctttctctatttctgtttcgtactcacgctcagtgttattgattttcgcactcagctcctgcccgacaaactcaccttaccgctgctctggcttggcttggtatttaatgcgcagtatggattaattgatttacatgatgcggtttacggcgcggtagcgggctatggggtgctgtggtgtgtttactggggcgtctggttagtttgtcacaaagagggattgggctacggtgatttcaagctactggccgctgcaggcgcatggtgtggctggcaaacgttgccaatgatactgctgattgcctcgctgggtggcattggttacgccatcgtttcacaacttctgcaacgccggactataaccactatcgcattcggcccgtggcttgcgctcggcagcatgataaacctggggtatctggcctggatctcttattaaccgggagggttctccctcccgacacggctcaaccttcttcgcggatctgtgcttgcagataattttgcaggcccatcttctgaatcagatcaagttccgtttccagccagtcgatatggccttcttcatcacgcaaaatttctatcatcatatcgcggctgacgtaatcatgaacgctatcggcataaccaattgcctcacgcaaattcttcgcgccatccagctcaagtgccagatcagaacgcagcatttcctcaacatcttcaccaatgttcagtttgcccaggtcctgtaagtttggaagaccttccagaaaaagaatgcgctcaatataacgatcggcgtgtttcatctcatcaatggattcatgatactccacatcattgagacgtttgagaccccagtttttaaacattcgggcatggagaaagtactgattgattgcgacaagctcatttcccaacagtttgttgagataatttataactttagtatcacctttcattttttgactccttcgcttccactctttgaagagtagaacggcttacgagtaagtcaaaaaacacactccgtttatgcggactccttaaactccggcagctgcattaattcatcctccatcacttcacgcgcggcccggacacatttaccgcactgattgccgaccggaataaatttttttaattgctggaacgagtgaggggaaaactggcgcacagcctgacgaatttttttatcgctgataccattacaaagacaaacgtacatagagactcccgtatactttcttcaaaaataaatgaaaatagttcttatttcaattacggaaagactcttttttaagcaaagaatagaaatatgaataaaaataatgggctaccaaaagtagcccattgacaaaaaatgcggcgatactggaaggtatcgccaacacatttattgcttagtaaacggcgcgaagatttcgctaaatgcgtacttcggtgcctgttctttagtcaggccgtggaattccggagacaggttagtgccgcccggcaggtcgcgcgcgattgaccagataccaaccataccgagattacgcttctgcgcatcctgcatgaccagacgagcatcagagagatagaacacctcgccctgaacgtcgttcacgccaaccatcggcgtggtacccatcatagcgtcaatttctgcatcgctcttattgggatggaggcctttcaattgtgaatgcaggttggcaatcgcagacgttgcacacttaccgtgaatgttctggccttcggtatttgcagactgacaaatcgcgttaccgtagtccattgtcatcacgttcacacccgccagctcaacacctttcgctttggcatcgctcaggacattcatcccttccggcgtcaggccagtcggcagaattggcaaggtgtaccagatagcaatatctttgccttctgacttccatttatcctgcactttcttcacagcaaggttacgacgttcaatagatgcctgatccgcaacccaggtgccttcgatatcgaagtccaggactttgaggttcaggttatcaacgatgtcataataatgctgcatcagatcgtctacgttcttacaggaagcagccagcggagcgttgttagcaccaccgatagacagcatcacatcgccgccagcctcacgcagagctttgattttgctgtactgagcgtaattctgcataccgtaagcggtaccccatgtcggcagacaggtgttcgcatctttactcaccacaaacgccagcgtgaagtggttgacgttatgattcttagccagcgcagccagatccgggatcgtattcagcgtaaagtcgacatacggtgcataaacgtgtttcggccacgctttcttcggcgtacctacgcgctctttggttccggtccagtcaacaaaaacacgccacgggttgctgtcagaaggagaaactttctgcactttactctgagaaatgtagttcacaccgttaaagcgaatcagcgtatcgctggcataaagcgtttctggattaaactgcggcgcattattcagctcttcgttgctatagctctgagccttacctaacggcttccacgggcggctattgctaccggtggcgttttggttcgccaccagagcagggttgtcactttgcgtccagaacagcgcttcataagcttgcccatcaacaacaacgcgatcacctttcacgtacacagtggatgcggaccatgctttcgccggttcgtatttcttccacgggttatcgccgcccgggacaaagccccatgcgtcttgatcgacagaagttttataatgtgcatcgttataatctacgatgctgtccgcgctgtacgctttgctggcctggaaaccatccgcaacaatgacgccgccgttatcaatttcacaggtagtcgggttaccgtactgactcaattccgcagcggtagctgtacgctcgagacgccatgggttattggagttttcagcgctggtaccccgtgggcaatctttagacccaacccaccaggcgttcttgtaaacattaccattgaaaataacatggtaaatttcgctaccttcctggccgctccacgcttgcaatgagtaatcgttaacgctatccgctggtgttgatggctcgctgttatccggagttggggtcaccggtgtttccggagttggatcaaccggagtcacagcaccgccattattatccggcttaacggaacaggagccagggttaccatactggctgatttctgttgccgttgccgcgcgaacataacgccatgggttactggcatcgttttctttcgcatcgcctgggcaatttgccgcgcctacccaccaggcgttcttataaatgccgccgttatagataacgtaccatgtagaagaaccttcctgacctttccaggctactacagcatagttgtcgtttgacttatcagctggggctggctgaacatcaggagccggtttaacgtccggtgccggtttcacatccggtgaaggctgtggtgctgaagtacaggactgtggattactggtttctgagatttccgttgccgtagcggcacgaacataacgccatgggttgctggcatcattgcttttcgcatcacccggacagttagaagaggctacccaccaggcatttttatataccgcaccattaaagacgacataccaggtctgaccgccctgctgtttattccaggcaactacagaagaattagacggaacagtgccctgtgctggtgtagccgaaccgccattagccggcgtattggatgcaggcgtatttgaatttgaagaagatgagctgccgctcttttcgcaggaaagtgtattgccaaactgactaatttcagcagctgttgcggtacgctttaaacgccacgggttagttgcatcatttgctttcgcttttcccgggcaatttgtagaagaaacccaccaggcattttcataaattttgccatcgaaaataacctgatatttattaccaccttgttggttattccatgcttccattgccaatgctggcagagcggaacacaccagccccataccaatcatagatttagtaaatatatttaatttcattataatcccttgtgacgtaaaaactgcaaaacaaaagtcctacgcaggaattatttacgttttacgagaacccttcaatatgaattaaattacggcattaaaaataagaaaaaagcctgacaaatgaagcattttaaaaacagaaacattcatatttaaaatgttaaattgaattgatattttaaatatgaataatttattcgttctgacagtacgaataagatatgccgtcaacaaatgcaaaaagggcgccgaagcgcccttttcaattcaaaactaattaacgtgtaattagcccagaactttagcaacaacgcccgcgccaacggtacggccgccttcacggattgcgaaacgcagaccgtcgtccatcgcgatcgggtggatcagggtaacaaccattttgatgttgtcgcccggcattaccatctctacgccttccggcagttcgatggtaccagtcacgtcagtagtacggaagtagaactgcggacggtagcctttgaagaacggagtatgacggccgccttcatctttggacagaatgtacacttcagattcgaacttggtgtgcggcttgatggtgcccggcttagccagtacctgaccacgttcgatttcttcacgtttgataccacgcagcagaacacctacgttctcaccagcacggccttcgtccagcagtttgcggaacatttcaacgccagtacaggtagacttctgagtctctttgataccaacgatttcaacttcttcaccaactttgatgataccgcgttctacacgaccggtaacaacggtaccacgaccggagatggagaatacgtcttcgatcggcagcaggaacggcttgtcaatcgcacgctctggttccggaatataagaatccaggaagccagccagttccaggattttcgcttcccactctgcgtcgccttccagcgctttcagagcagaaccacgaacgatcggagtgtcgtcgcccgggaagtcgtactgagacagaagttcacgaacttccatttcaaccagttccagcagctcttcgtcatcaaccatgtcgcatttgttcaggaacacgatgatgtacggaacgcctacctgacgacccagcaggatgtgctcacgagtctgcggcatcgggccgtcagtcgcagcaactaccaggatcgcgccgtccatctgagcagcaccggtgatcatgtttttaacatagtcggcgtgccccgggcagtctacgtgtgcgtagtgacgggtcggggtgtcgtattcaacgtgagaagtgttgatggtgataccacgagctttttcttccggcgcgttatcgatctggtcgaatgcacgagcagcaccgccgtaggttttagccagtacggtggtgattgcagcggtcagagtagttttaccgtggtcaacgtggccgatagtaccaacgttaacgtgcggttttgtacgttcaaatttttctttagacacggctatattccttactatagtgctctccccttcaggagagagcacgggactttggtattaacccttaggcttatttaccacgggcttcaattacggcctgagcaacgttactcggcgcttcatcatacttcaggaattccatagtgtatgatgcacgacctttggtcagagaacgcagctgagttgcgtatccgaacatttcagacagcggtacttcagcgtggatcttaacgccagtaacttcagattcctgacctttgagcataccacgacgacggctcaagtcaccgataacgtcaccggtgttctcttccggagtttctacttcaaccttcatgatcggctcaagcagaactggtttcgctttcttaaagccttctttaaaggcgatagaagcagccagtttaaacgccagttcagaggagtcaacgtcatggtaagaaccgaagtgcagacgaatacccatgtctactaccgggtagcctgccagcggacctgctttcagctgttcctggatacctttatcaacggccgggatgtattcgccagggattacaccacctttaatgtcgttgatgaactcgtagcctttcgggtttgaacccggctccagcgggtacatgtcgataacaacatgaccatactgaccacgaccaccagactgtttcgcgtgtttaccttcaacatcggtaactttctggcggatagtttcacggtaagcaacctgcggtttacctacgttcgcttcaacgttgaattcacgcttcatacggtcaacgatgatgtcgaggtgcagttcgcccatacccgcgatgatggtctggttagattcttcgtcagtccatacacggaaagacgggtcttctttagccagacggcccagagccagacccattttttcctggtcagctttggttttcggttcaactgcgatggagattaccggctcagggaattccatacgttccagaatgatcggcgcatccgggtcacacagggtgtcaccagtggttacgtctttcagaccgatagcagcagcgatgtcgcccgcgcgaacttctttgatctcttcacgtttgttagcgtgcatctgaacgatacgaccgaaacgctcacgtgcagctttcacggagttcagtacggtatcaccagagttaaccacaccggagtaaacacggaagaaggtcaggttaccaacaaacgggtcggtagcgattttgaacgccagtgcagagaacggctcgtcatcacttgcgtgacgttcagccggagtgtctttaccgtcgtccaggataccgttgatcgcaggtacgtcaaccggggatggcaggtaatcaattaccgcatccagcatcgcctgaacacctttgttcttgaacgcagaaccacaggttaccaggatgatttcgttgttcagaacgcgctgacgcagagcacctttgatttctgcttcagtcagttcttcaccacccaggtatttttccatcagctcttcagaagcttcagctgcggattcgatcaggttctggtgccattcgttagccagttcaaccatgtctgccgggatatcttcgtattcgaaggttacgccctggtcagcgtcgttccagttgatagctttcattttcaccaggtcaacaacaccggtgaaatgttcttcagcaccaatcgccagctgcagcggaaccgggttcgcgcccagacgggttttgatctggttaacaactttcaggaagttcgcacccatgcggtccattttgttaacgaacgcaatgcgcggaactttatatttgtttgcctgacgccatacggtttcagactgcggctgaacaccaccaactgcgcagtaaaccattaccgcaccatcgagaacacgcatggaacgttctacttcgattgtgaagtcaacgtgccccggggtgtcgatgatgttgatgcgatgcggctcatactgcttagccataccagaccagaatgcagtagtcgcagcggaagtgatggtaataccacgttcctgctcctgctccatccagtccatggttgcagcgccgtcatgaacttcaccgattttatggtttacaccggtgtagaacagaatacgttcggtagtagtggttttaccggcgtcgatgtgcgcactgataccgatgttacggtagcgtgcgatgggtgttgtacgagccatttgtttcctcgtttatcttttaggcgttcaatttaagtagcccaaagcgggctgcttactggaagcgcccgcctggtgactaaaactccgaagggattaccaacggtagtgtgcgaacgccttgttggcttcggccatacggtgaacgtcttcacgtttcttaactgcagtacctttgttttctgcagcatcagaaagttcgttcgccaggcgcagagccatggatttatcaccgcgtttacgagcagcttcaacgatccaacgcattgccagagcattacgacgaaccggacggacttcaactggtacctgataagtagaaccaccaacgcggcgagacttaacttctacagtcgggcgcacgttttcgagagctacttcgaatgcttccagttcagatttaccagagcgctgagccagggtctccagcgcgctgtatacgatagattcagcagtagattttttaccatctaccatcaggatatttacaaatttagccagcagttctgatccgaacttcggatccggcagaattttacgctgaccaatgacgcgacgacgtggcatggaaatactccgttgttaattcaggattgtccaaaactctacgagtttagtttgacatttaagttaaaacgtttggccttacttaacggagaaccattaagccttaggacgcttcacgccatacttggaacgagcctgcttacggtctttaacgccggagcagtcaagcgcaccacgtacggtgtggtaacgaacacccgggaggtctttaacacgaccgccacggatcaggatcacggagtgctcctgcaggttgtgaccttcaccaccgatgtaggaagtcacttcgaaaccgttagtcagacgaacacggcatactttacgcagcgcggagttcggttttttaggagtggtagtatatacacgagtacatacgccacgtttttgcgggcatgcttccagcgcaggcacgttgcttttcgcaactttgcgagcacgtggtttgcgtaccagctggttaactgttgccattaaatagctcctggttttagcttttgcttcgtaaacacgtaataaaacgtcctcacacaatatgaggacgccgaattttagggcgatgccgaaaaggtgtcaagaaatatacaacgatcccgccatcaccaggccatctggctggggtgcttaaccgtaagtctgacgaaatcagtatagtcaatgagaatgatgtcgttcgaaatttgaccagtcaaaccgcgggcaataaggtcttcgttcagggcatagaccttaatgggggcattacgcagactttcaaggtagcggttaccgtcaactgcggcagttacgccatcttgcaataatagcagttcgtctccttcactgagcagacgcagcagcgcagcaaaatccgtcagccagggtgagcgatgtaatgtgtgcagcataaacgcctcaaaacctcaaaataacatcgtagttggcgagttcgcggcgtaaggcatctgcttcgagcggcgtggcttcgacaacaaagggtgtctgcggatctaacccgcgttcgcgcagtgaagccgcacaaacccagcactgttcaatgtcgtacagacccaacaatttaaaagtggcaatgtaatcacgcgccagcactgcatcgggcttttgtcctggcagcagctgaaaaacgccatcagctataaagaagacagccagatcgtcagttaatgcggaagttgccagtaaagcatctaaaccttcccggcctgcggctgtaccatgaggtgcagtagaaaaaacaaacgcaattcgtttcatcagaactgtaccaccctgtcacaggtcagcgaggcttccgccagcgccccaagtccgcttaaggtaaatccctgctgaaggtttgacgaagccagccccagtcttccggcctccgtttcatcaacaacgccacggcgtaatgctgccgctacgcagatattcagcgccacaccatgttgcgcattcagttgttgccaggcccgtacgaggtcaaattcgtcacttgccggagaggtcaattggttagcgttatagaccccttcccgatagaaaaagacgctgcttaactcatggccatctgctatcagcgcctgcgcaaactgaaaagcactactcgcctgttgcgtaccgtatgctggcccggtcaccacgatggcaaaacgcattacttatcttgcccctggaaatcaccgctcttgaactggcggatgtagagatagacagtgtgtttggagatgttcaggcggtcagcaacctggttgatcgcatctttaatatcgaagatccctttctcgtagagattcagcacgatctgacgatttttggcgttattagaaacattgcgatcggcattcacttcttcgatggtgaactccagcgtttgggtaaccagatcttcaacagaagaggcaaagttgacgcttgaaccgacatccggggtttctggcggcacaaaggtgctcataatctgcgagaagggaacatcaagattcatattgatgcacagcagaccaattacacgctgttcgcggttacgaatcgcgatagtcagggacttcattaatacgccgcttttggcgcgagtaaagtagcatttagaaacgctgctatccgctcccgtcatatcgtgcagcatacgtagcgccaggtcagtaattggcgaaccaatcttccggcctgtatgttcaccgttagcaatgcgaatggctgaacattttagatcctgcaaagagtgcaaaacgatttcacagtgggagccaataagcatcgctaacccgtccaccaccgcttcgtaggatttcagaatatcaaaatcggtctggtcgaaaggacgttgatccagtaaatccaactcactggtttcgttggttaaaagcgacctggacatgaaaaaaaacactccttttcaggagcctgtcgttaacttttcagggcaggctcattaatgatgcgggtaactaaattaatacagcggaggttccgctttccagcactaattatatccggcctgtaataaaaaaaccgccgcctggtcaggcggcggttcttaatgcttattttttagcagaatctgcggctttcgcatcagcttccggctttgcatcagccttcggcgctggtttcacatccagcagctctacgtcaaacaccagggtagaattcggtgggatccccggaacacccgctttgccgtaagccagttctggtggaataaccagtttgatcttaccgcctttcttgatgttcttcagaccttctgtccaacccgggataacaccgtccagacggaaagaaagcggttcaccacgggtgtaagagttgtcgaactctttaccgtcgatcagcgtacctttgtagttcactacaacagtatcgctgtctttcggtgcttcgcctttaccggcttctactacctgataaaccagaccagttgaagaggttttcacacctttctctttggcaaatttctcgcggtactctttaccttttgcttcgttatcagccgcgtctttttccatcttcgcctgagcagaagacttcacgcgagcttcgaatgcttgtagagtctgttcgatctcttggtcggagagtttgctcttatcagcaaatgcatcctgaacaccagcgatcagctgatctttatccagtttgatgcccagtttttcttgttcttttagagagttttccatgtaacgacccagcgaggcacccagtgcataagctgatttctgatcgtcatttttgaacgctgctttgctgtcagcagctgtagcaggttttgcagcttcagcagcaaaagtgattggtgcatgcagggcaacggccattgtggtcgccagcagcgttactttaaacagtgatttcatccatatctccaggatcggggcatctcaccccagggttaactattatcagaagggtactataaagcgttgtcgaacaaatctacatacagacacgccctattatcatctattttcagactctttttgtttaaattagtttcgatgaccgcgaaatgagtgctgtctcgggcagcaaagttaagtagaatccgcggcgaccattcgacaaaagaggtgaatcatgcaggatttatcattggaagcacgcctggcagagctggagagccgactggcttttcaggaaatcaccattgaagaactgaacgtcacggtgaccgctcatgaaatggagatggcgaaactgcgcgatcatctgcgtctgctgaccgagaagttaaaagccagccagccgtcgaacatcgcgtcgcaggctgaagaaacgccaccgccacattattgaggcgtaaaaaaagcggggattccccgcttttttgtcactttttcggtattagtggcaaccgcaaccgccgttgcctttaccgccacagcagccttcgccaccgtgttcatgaccgtgatcgtggccatgaccgccgcagcaaccgtcgtggtcgtgatcgtggtggtgatcgtgcgcgccgtgaacgtgaccatgagccagttcttcttcagtcgcttcgcgaatcgccacaacttcaacgttgaatttcaggttctgaccggccagcatgtggttaccatcaaccacgacgtgatcgtcttcaaccgcagtgatttcaaccggtaccggaccctggtcggtttcagccaggaaacgcatacctacctgcagttcatcaacgcccataaatacgtctttaggaacacgttgcaccaggttttcgtcgtactgaccgtaagcgtcgttcgcgccaacagcgacatcaaatttgtcgccaacttcatgaccttccagcgccgtttccaggccagagatcagggaaccgtgaccatgcaggtagtccagcggcgcactcaccggagactcatcaaccaacacaccgtcttctgtacgtacctgataggccaggctgaccaccaggtcttttgctactttcatgatatctcctgagcatgggaagaatagtggcgcagattgtagcggaattctgcagccgtgtactcactagcttaaaaaaactcggcgcatatcgctagtccggatgaaaaatcccgatcacttgctcatctttgcgaacgtgatcgcgggcttctttgtctgcttctcgcatctgatgtccgcacttaacacattcaacaatatcaatattattttcgcgccacatcgccattgaatcctgcgcctgacaggccgggcattttgcgcccgcaataaaacgttttcggattgccatctttaccctctactcaaattcatcccagccgtccagctggcgtcgttcttgttgcatttcacgctggaaaatctcttccagttcgcgtcgggcttccctggcgcgagaaatttgtacggtatcggcatgcattgggatgagctctcgcagcatccgcatatccaggcggcgaaaatgcagttgcgctcgctgtgcctgatgcggatgcatgccaagcgtgaccagcgtcttgcgccccagctctaacgcactggagaatgtttcacgggaaaactgcgtcacccctgcctgtaataactcatgcgcttccacacgtccgcgcgctcgcgcaagaatatgcaaatgcggaaagtgctgttggcatatttccaccagcttcatggtgtcttccggctcgttacaggtaatgacgatagactcagcggcctctgcacccgcagaacgtaaaagatcgacctgcgtggcgtcgccgtaataaactttgtagccgtatttacgcatcaggttaacggcgctgatatcccgctccagcacggtaatgcgcattttatttgccatcagcaaacgaccaatcacctgaccaaaacgcccgaagcccacgacaatgacctggggtttatcatcgttgacccacggtttttcgtcttcttcttccggtccgttaaactggcgggatagccatttatccaccagcttcatcagcaacggcgtggtcatcatggaaagcgtcaccgtcaccagcaacaacgccatctggtcgccctggaataagcgttgtgaagaagcggtagaaaagaggacaaaggcaaactcaccaccctgactcaacacgccagcaaactgcatccgctctgagctacgcacgccatacaatcgcgccagcagatacagcacgagaattttcaccgccaccagcacaaccacgcttatcactacccacaacagatgggtataaagcaccccgaggttgagtgacatgccgacagagataaagaacaaaccgagcagcaagcctttgaagggatcgatagccgtttccagttcatggcgatattcactttccgccagcagcacgcccgcaataaatgtaccgagcgccatcgacagccccagcgcatccataaacaatgcggaacccaacaccagcagcagcgtcgcggcggtgaacacttcccgcacgccagaagctgcaataaagcggaataccggacgcagtaaatagcgcccaccaatcagcatgccgacaaacgccagcaccttcatgccgaccttcatccagtcgaaatgttcgtctgccgaccccgccaacaacggcactaacgccagtgctgggattactgccagatcctgaaacagcagaaccgaaaacccgagctggccggattcgctgcgattcatccctttctcacgcatcaattgcaacgccattgcagttgaagacatcgcaaggccaatgccaccgaccaccgccgcctgccaggcgaaatccgtcagcatcaataatcccgccagcaacgccgcgcttaacagcacctgtgccgcgcctacgccaaaaatcgaacgccgcagttgccaaagtttggagggattcaactcaaggccgatgataaacatcaggaataccacgccgagttccgaaaagtggaggatctcatcgacgtcgctaataaaccccagcccccacgggccaattgcaatccctgccagcaaatatcccaacacagcgccaatacccagccgcgatgccagcggcaccgcagccaccgccgcgaagagaaacagcactcctgcgagtaaaaaatcggaaccttccatcagcggcctcctggagacagcggatttgccagccagtcaccgtaggctctggcgtggctcgccagctcctgtgcgctttgccgtctcgcccagtaaataatgatgggacttaaccaatgcatccggcacatgcccgccgccagttcaaaggggcgcagcacatcgctcatcgggtagcgattcagcgcgtcataacggtaagcactttccggctcgccggtggtaatcacgctacgccagtactttcccgccagttggtttcctcccggcccgctggcaaaaccacgacttaatacccggtccagccactctttcagtagcgccgggcagctataggtataaagaggatgctgaaagacaatcacctcgtgctcgcgcagtaatgcctgctcacgggggatatcaataaaaaaatcgggatagtgcgcgtaaaggtcgtgcacggtaacattgctgagctgcgtggccggtttaagcagtacccggtttgccaccgagtcctgagattccggatgggcatacagcagcaaaactttcgctggctgagacatcatccccctcccggtatggtttttgtgtatagtcgctgttttgggctaccattgcgcccggtgcggcagctcgcccatacattacattatcataatgataagttaacatagtctgaacatacggcaccttatgattgttttctcctcgttacaaattcgtcgcggcgtgcgcgtcctgctggataatgccaccgccaccatcaaccctgggcagaaagtcggcctggtgggtaaaaacggctgtggtaaatctaccctgctggcattgctgaaaaatgaaatcagcgccgacggcggcagctacacctttccgggaagctggcaactggcgtgggtgaatcaggaaacgccggcgttaccgcaagcggcgctggaatatgtcattgacggcgaccgtgaatatcgtcaactagaagcgcagctacacgacgccaacgaacgtaacgacgggcacgccattgcgaccattcatggcaagctggatgctattgacgcatggagtattcgctcccgtgctgccagcctgctgcacggcctcggtttcagcaatgaacaactggagcgcccggtaagtgatttttccgggggctggcgtatgcgtcttaaccttgcccaggcgctgatttgccgttcagacttgctgctgctcgacgaaccgactaaccacctcgatctcgatgccgttatctggctggaaaaatggctgaagagctatcagggcacgctgatcctgatctctcacgaccgcgacttcctcgatccgatcgtcgataaaattattcatatcgaacaacaaagcatgttcgagtacaccggcaactacagttcgtttgaagtacagcgcgccacccgtctggcgcagcaacaagcgatgtacgaaagccagcaggaacgcgtagcgcatctgcaaagttatatcgaccgtttccgtgccaaagccaccaaagcgaagcaggcccagagccgcattaagatgctcgagcgtatggagctaattgcccccgcgcacgtcgacaacccgttccgctttagcttccgcgcgccggaaagcctgccaaatccgttactgaagatggaaaaagtcagcgcgggctatggcgatcgcattattctcgactcgattaaactgaacctggtgcccggctcgcgtattggtctgttaggccgcaatggcgcgggtaaatcgacattaatcaaactgttagccggtgaacttgcgccagtcagcggtgaaattggtctggcgaaagggatcaaactcggctacttcgcccagcatcaacttgaatacctgcgcgccgacgaatcacctattcaacatctggcacgtttagcgccgcaggagctggaacaaaaactgcgtgactacctcggcggctttggtttccagggcgataaagtaaccgaagaaacgcgccgcttctccggtggggaaaaagcccgcctggtgctggcattaattgtctggcagcggccgaatctgctgctgctcgacgaaccgactaaccaccttgacctcgacatgcgtcaggcactcaccgaagcattaatcgagtttgaaggcgcgctggttgtcgtttcgcacgaccgtcatttgctgcgttccaccactgacgatctctacctggttcacgatcgtaaagtcgaaccgttcgacggcgatctggaagattatcaacagtggttgagcgacgtacaaaagcaggaaaaccagaccgacgaagcgccaaaagagaatgcgaacagcgcccaggcacgtaaagatcagaagcgtcgggaagctgagctgcgtgcgcaaacccagccactgcgtaaagagattgcccgtctggaaaaagagatggagaagctgaacgcgcaactggcgcaggcggaagagaaactcggcgacagcgaactgtatgaccagagccgtaaagcggagttgaccgcctgcctgcaacagcaagccagcgccaaatccggcctggaagagtgcgaaatggcatggctggaagcccaggagcagcttgagcagatgctgctggaaggccaaagcaactgatggcgcagataacgacgaccgatgccaatgaattcagcagcagtgctgaattcatccccatgcgcggctttagcaattgtcatctgcaaaccatgctgccgcgtctgtttcgtcgtcaggtgaaattcaccccgtactggcagcggctggagttgcccgacggcgattttgtcgatcttgcgtggagtgaaaaccctgcacaggcgcaacataaacctcgtctggtggtgtttcacgggctggaaggcagtctcaacagcctcagcgttacttgctgaacctgttaaaagccaatgccgcgcgcaagctggcagcctaccccggaacgctgccgattaatctcgcgcagttaaaatcggtacgtcgcatccgtgaatttgacgatctcatcaccgccagaattcacggctacgccgacgctatcgactattatcgtcagtgtagcgccatgccgatgctgaaccggatcgccaaaccgacgctgattattcacgccaaagacgatccgtttatggatcatcaggtgatcccgaaaccggaaagtctccccccgcaggtggagtatcaactgactgaacatggcggtcatgttggctttattggcggtacattacttcatccgcaaatgtggctggagtcacgcattcctgactggttaacaacgtatctggaggcgaaatcatgttgattccgtggcaagacctctcccccgaaacgctggaaaatttaattgaaagctttgtgttacgtgaaggcaccgattatggtgaacatgagcgtacacttgaacagaaagtcgccgacgtcaaacgccagctacagtgcggagaagcggtgctggtatggtcggagctgcacgaaacggtcaatattatgccgcgcagtcagtttcgcgaataacctgcaaccgtcggcggacgagataataatgatagctaagtcatggagttactatgtctgccaaacatccggtcattgcggtaacaggatccagcggcgcggggaccaccaccaccagcctcgcgtttcgtaaaatattcgcgcagttaaatctgcatgcagctgaggtggaaggcgacagttttcaccgttacacccgcccggaaatggacatggcgatccgcaaagcgcgcgacgccgggcggcatatcagctacttcggccccgaggctaacgacttcggcctgctggaacaaaccttcattgaatacggtcagagcggcaaagggaaatctcgcaaatatctgcatacctacgacgaagccgtaccgtggaatcaggtaccggggacattcaccccctggcaacctttaccggaacccactgatgtactgttttatgaaggtttacacggcggcgtagtcacgccacagcataacgttgcgcagcatgtggacttactggtcggcgtggtgcctatcgttaaccttgagtggattcaaaaactgatccgcgacaccagcgagcgcgggcactcacgagaagcagtgatggactcagtagtgcgttcaatggaagactatatcaactacatcacaccgcagttttcccgcacccatcttaacttccagcgcgttcccaccgtcgacacttcaaacccgttcgcggcaaaaggtatcccgtcgctcgatgaaagctttgtggtgatccattttcgtaatctggaagggatcgatttcccctggctgctggcgatgttgcaaggctcattcatttcccacatcaatacgttagtggtaccgggcggcaaaatgggtctggcaatggaattaattatgctgccgctggtgcaacgattgatggaaggaaagaaaatcgagtaactctgctattacgccggataaaatactatccggcttcacaacgggatagttaagtcacgcggcaaccacttcatacgagtgagtaatattcaccgctttttccagcatcaacgccactgaacaatatttctcggcagagagatcaaccgcacgcgcaaccgctgcgtctttcaggtcgcgaccggtgacgataaaatgcagattaatgtgcgtaaacaggcgtggtgcctcttcgcggcgttcagaggtcaattttacttcacaatcgaccacatcctgacgccctttttgcaggatcgaaaccacatcgatggcactgcaaccacccgccgccatcaacaccatttccatcggacttggtgctttatcgcctgagttgccgtccattaaaatctgatgaccagaggcggattcgcccagaaaagttaacccttcgacccacttcactcgcgcttgcatttttgctactccactgcgtcaattttcctgacagagtacgcgtactaaccaaatcgcgcaacggaaggcgacctgggtcatgctgaagcgagacaccaggagacacaaagcgaaagctatgctaaaacagtcaggatgctacagtaatacattgatgtactgcatgtatgcaaaggacgtcacattaccgtgcagtacagttgatagccccttcccaggtagcgggaagcatatttcggcaatccagagacagcggcgttatctggctctggagaaagcttataacagaggataaccgcgcatggtgcttggcaaaccgcaaacagacccgactctcgaatggttcttgtctcattgccacattcataagtacccatccaagagcacgcttattcaccagggtgaaaaagcggaaacgctgtactacatcgttaaaggctctgtggcagtgctgatcaaagacgaagagggtaaagaaatgatcctctcctatctgaatcagggtgattttattggcgaactgggcctgtttgaagagggccaggaacgtagcgcatgggtacgtgcgaaaaccgcctgtgaagtggctgaaatttcgtacaaaaaatttcgccaattgattcaggtaaacccggacattctgatgcgtttgtctgcacagatggcgcgtcgtctgcaagtcacttcagagaaagtgggcaacctggcgttcctcgacgtgacgggccgcattgcacagactctgctgaatctggcaaaacaaccagacgctatgactcacccggacggtatgcaaatcaaaattacccgtcaggaaattggtcagattgtcggctgttctcgtgaaaccgtgggacgcattctgaagatgctggaagatcagaacctgatctccgcacacggtaaaaccatcgtcgtttacggcactcgttaatcccgtcggagtggcgcgttacctggtagcgcgccattttgtttcccccgatgtggcgcagactgatttatcaccccgatatcaactatgcacttcgacaaacgctggtgctatgtttgcccgtggccgttgggttaatgcttggcgaattacgattcggtctgctcttctccctcgttcctgcctgttgcaatattgcgggccttgatacgcctcataaacgttttttcaaacgcttaatcattggtgcgtcgctgtttgccacctgtagcttgctgacacagctactactggcaaaagatgttcccctgccctttttgctgaccggattaacgctggtacttggcgtcactgctgagctggggccattgcacgcaaaattgcttcctgcatcgctgctcgccgccatttttaccctcagtttggcgggatacatgccggtctgggaaccgttgctcatctatgcgttgggcactctctggtacggattgtttaactggttttggttctggatctggcgcgaacaaccgctgcgcgagtcactaagtctgctgtaccgtgaactggcagattattgtgaagccaaatacagcctgcttacccagcacaccgaccctgaaaaagcgctgccgccgctgctggtgcgccagcaaaaagcggtcgatctaattacccagtgctatcagcaaatgcatatgctttccgcgcaaaataatactgactacaagcggatgctgcgtattttccaggaggcgctggatttacaggaacatatttcggtcagtttgcatcagccggaagaggtgcaaaagctggtcgagcgtagccatgcggaagaagttatccgctggaatgcgcaaaccgtcgccgctcgcctgcgcgtgctggctgatgacattctttaccatcgcctgccaacgcgttttacgatggaaaagcaaattggcgcactggaaaaaatcgcccgccagcatccggataatccggttgggcaattctgctactggcatttcagccgcatcgcccgcgtgctgcgcacccaaaaaccgctctatgcccgtgacttactggccgataaacagcggcgaatgccattacttccggcgctgaaaagttatctgtcactaaagtctccggcgctacgcaatgccggacgactcagtgtgatgttaagcgttgccagcctgatgggcaccgcgctgcatctgccgaagtcgtactggatcctgatgacggtattgctggtgacacaaaatggctatggcgcaacccgtctgaggattgtgaatcgctccgtgggaaccgtggtcgggttaatcattgcgggcgtggcgctgcactttaaaattcccgaaggttacaccctgacgttgatgctgattaccaccctcgccagctacctgatattgcgcaaaaactacggctgggcgacggtcggttttactattaccgcagtgtataccctgcaactattgtggttgaacggcgagcaatacatccttccgcgtcttatcgataccattattggttgtttaattgctttcggcggtactgtctggctgtggccgcagtggcagagcgggttattgcgtaaaaacgcccatgatgctttagaagcctatcaggaagcgattcgcttgattcttagcgcggatccgcaacctacgccactggcctggcagcgaatgcgggtaaatcaggcacataacactctgtataactcattgaatcaggcgatgcaggaaccggcgtttaacagccattatctggcagatatgaaactgtgggtaacgcacagccagtttattgttgagcatattaatgccatgaccacgctggcgcgggaacaccgggcattgccacctgaactggcacaagagtatttacagtcttgtgaaatcgccattcagcgttgtcagcagcgactggagtatgacgaaccgggtagttctggcgatgccaatatcatggatgcgccggagatgcagccgcacgaaggcgcggcaggtacgctggagcagcatttacagcgggttattggtcatctgaacaccatgcacaccatttcgtcgatggcatggcgtcagcgaccgcatcacgggatttggctgagtcgcaagttgcgggattcgaaggcgtaatgcaggctaaaccatcggataaggcattcacgccgcatccgacatcttttgcctgatgcttcgtatttacgccccaaccaccttcgccaccgcgtgggcgaaacgttgcatcccttcatcgatatccgcatcttccaccaccagcgacggtgcaaaacgcatcacatccggtccggcattcagcaccattacgccagcctctgcgcccgcatacaggaaatcacgcgcccgacctttgtactgtggtttcagctctgcgccaatcaacagccccataccgcgaatatcgctaaatacatcgtactgctgatcgatcttctgcagatggtcaacaaaacgctggcgtttcgcctgaatgccttccagcacttcaggggtattgatgatatcaaacgccgcccccgctactgcacaggccagaggattaccgccgtaggtggaaccgtgagaaccaggatgaaacgcagaagcaatttccgccgtggtcagcatggcgctaatcgggaagccgccgcctaacgctttcgcagaggtcagaatatccggcgtaacgccgtagtgcatgtaagcaaacaaatcgccggtccgccccatcccgcactgcacttcatcaaacaccaataatgcctgatgttgatcgcacagctcgcgcaagccctgcaaaaactctggcgtcgctgccgtcacaccgccctcgccctggatcggctcaaccaccaccgcacaggtgtgatcatccatcaccgctttcactgcatggagatcgttaaagggaacgtggatgatgtctgccggtttcggcccaaagccgtcggaatattttggctgcccacccaccgaaacggtaaacagcgagcgaccatgaaaagcgttatggaaggcaataattttggttttgaacgggctatgacgcacacaggcgtaatggcgtgccagtttaaaggcggtttcgttagcttccgtgccggagttcataaacaccacgcgttcggcaaacgttgcctcaatcagtttacgcccaagacgcagcgccggttcattggtgaaaacgttactgatatgccacagagtttcgccctgggtttttaacgcgttcaccagcgcaggatggcaatggcccaacgccgtaactgcaatgccacccgcgaaatcgacatactccttgccttgctgatcccagattcggctgccctgaccttttaccggaataaactctgccggagcataaatcggcaggatcacttcatcgaaagtcgcgcgtgtaattgctgtttgttcaattgccatctcatgatcaccctgttacgcataaacaaatgtgaaattataaccacaaaatatgcataaaaaatcactaaatggcaatcagaaatcagcgatgcaggaaattagccagcagttgatgtccttgttcgctaagaatactttctggatggaactgcacaccttccagatcccactggcgatggcgaatccccataatctcgcgggtttcgctccaggccgtcacgtcaaagcacgctggtaatgagtcaggttccaccaccagcgaatggtagcgtgtcacggtaagtggatttgccagcccccgaaatacgccctcaccgttatgtgtaatcggcgaggttttgccgtgcatgacctttgcggcgcgcacaactttaccgccaaatgcctgcgccattgcctgatgaccgaggcagacgccaagaatcggcaagcgcccggcatagtggcgaataacgtcaagggagatcccggcttcatctggcgtacaggggccaggtgagatgacaattttttgtggtttaagggcgtcgatatccgccagcgtcaacgcatcgttgcgcttaaccagcacatccgcccccagttcacaaaagtactggtagaggttccaggtaaaagaatcgtagttatctataagcaggatcatggcggctccggtacaaaagaaccgcgctattttactcagattccccggcttcgcttaccactttgctaaatatcatctgcagtgcggtgagatcccccattgccccactctgatttgcctgattccaggcctctttttcgataccctgccagctcagttgatatccggcatgaatcgccagttgctcgaagaagatccgctgtgccagaccacttcccacccggaagggatgcagcacgttgatttcacaatagtaatgcgccagccgctcgacgaacttcgctttctccaggccaaccagataaccttcttcctccagatcctgcatcagggcattgccctctttttcgatataagcaaagtggcagaacggcgtatcaccctgataaatatcaacttcacgcagttgccctgcccagtcgaaaatatcctgatacagctggcgatggatagttcgcaaatgcggtaaaccgcgcaccagcggaccaagctcaatggtcgcagcacgcagcgccgtcatttcgtaagcggcctgttccagccgctgctgctggcggatgttcagccggttacgcatgatatcaaggcctggataaagatacggatcgcgcccttcgccgaatttatcgctcatagtgactcctcagctcttcaaggcgcgctaaagcctctgcggcagtaagagtgactaaaggcatctcgacgccttcaagacggcgactggcctgaaaattacgattacgctgaagctcccagagacgggacttttgcttatcggtgagtttcttcacttgatgcctccctgaacgtgtccatttgccacaagtataagcggcaaatccgggttacgccgggagagcagaagcgcgggcaagattgcccgcgcgagaaatcattacggcaggactttagcggaaaggataactaccggttttgacggcacattctggtacggaccaacgtcatgagtcggcacctgggaaatcttatcggcaacgtccatgcctttcaccactttaccaaataccgcgtaaccgaaatcacgctgaccatggtcaaggaaggcgttatcggcaacgttgataaagaactggctggtggcgctgtctttgtcagcggtacgtgccatcgcgatggtgccacgcgtgttgcgcaggccgttatcggcttcatttttgattggcgggtttggttttttctgctgcatctgctcggtgaaaccgccgccctgaatcataaagccaggaatgacgcggtgaaaggtagtgttgttataaaaaccgctgttcacataatcgacaaagttttgcacagacactggcgctttttgtttatccagctccagttcgatgttaccagctgaggttgtcaacaatacgtgcgggtcccctttcgctgccattgctgcgggagaaagagcagaaagagcgaaaacagcagccatcgccgccagggtcgatttgaacatgagatttccttaacaaacagagcagaaaaaaagcaagtgaagagattctaaatagccttcaagaacaaggccatccctttacctaattttacgtatctgaaatatatgtaacctgacgatcactttttattccgtgatcaaaatcacctcttaaaatgcaatttagcaaccgattgcaataaaacatttaaacagatcacaaaatcacctaaaatcgcccgctcgcggcatatcccgctatgccattttatttttgaacgcaggccaatcatgactaacagcaatcgcatcaagctcacatggattagctttctctcctacgcactgactggtgcgttggttattgtcaccgggatggtgatgggaaatatcgccgattatttcaatctgcctgtttccagtatgagtaataccttcaccttcctcaacgccggcattttaatctctatcttcctcaacgcctggctgatggaaatcgtcccgttgaaaacgcagttacgttttggctttctcctgatggtgctggcggttgccggtttgatgttcagccacagcctggcgctgttctcggcggcgatgttcattctcggggtggtcagcggcatcaccatgtcgattggtacattcctggtaacacaaatgtatgaagggcgtcagcgcggttcccgcctgttatttaccgactccttcttcagtatggctgggatgattttcccaatgatcgccgcgtttctactggcgcgcagcattgagtggtactgggtttatgcctgcatcgggctggtgtatgtcgctatttttattctgaccttcggctgtgagttcccggcgctgggcaaacatgcgccaaaaacggatgctccggtagagaaagaaaagtgggggatcggcgtactgtttctctctgttgcggcgttgtgctacatcctcggtcagttaggttttatctcctgggtgcctgagtatgccaaaggcctgggcatgagcctgaacgacgcgggcacgctggtgagtaacttctggatgtcatacatggtcggcatgtgggcgttcagctttattcttcgcttctttgatttgcaacgcattctgaccgtactggctggtctggctgcgattctgatgtacgtctttaacaccggaacaccagcacatatggcgtggtcaattctcgctctgggcttcttctccagcgcgatctataccaccatcatcaccctgggttcacagcagaccaaagtaccgtcgccaaaactggttaactttgtcctgacctgcggaaccatcggtactatgttgacctttgtggttaccggcccgatcgttgaacatagcggtccgcaggcggcactgcttacagcaaacggtctgtacgctgtcgtctttgtgatgtgcttcctgttaggtttcgtcagccgtcaccgtcagcataacaccctgacctctcattaattgctcatgccggacggcactatcgtcgtccggccttttcctctcttcccccgctacgtgcatctatttctataaacccgctcattttgtctattttttgcacaaacatgaaatatcagacaattccgtgacttaagaaaatttatacaaatcagcaatatacccattaaggagtatataaaggtgaatttgatttacatcaataagcggggttgctgaatcgttaaggtaggcggtaatagaaaagaaatcgaggcaaaaatgagcaaagtcagactcgcaattatcggtaacggtatggtcggccatcgctttatcgaagatcttcttgataaatctgatgcggccaactttgatattaccgttttctgtgaagaaccgcgcatcgcttatgaccgcgtacacctctcgtcttacttctctcaccacaccgccgaagagctgtcgctggtgcgcgaaggcttctacgagaaacacggcatcaaagttctggtcggcgaacgcgctatcaccatcaaccgtcaggagaaggtgattcactccagcgccggacgtacccttttttatgacaagctgatcatggcaaccggttcctacccgtggatcccgccaatcaaaggttctgatactcaggactgctttgtctatcgcactattgaagacctcaacgccattgaatcctgcgcccgtcgcagcaaacgcggtgccgttgttggtggcggcctgttaggtctggaagccgcaggcgcgctgaaaaacttaggtattgaaacccacgttatcgaatttgcccctatgctgatggcagaacagcttgatcagatgggcggcgagcagctgcgtcgcaaaatcgaaagtatgggcgtgcgcgttcacaccagcaaaaacacccttgagattgtgcaggaaggtgttgaagcgcgtaaaaccatgcgttttgccgacggcagcgaactggaagtcgactttatcgtcttctctaccggtatccgtccgcgcgataagctggcaacccagtgtggtctggacgttgctccgcgtgggggtattgtcattaatgattcctgccagacttccgatccggatatctacgccatcggtgaatgcgcaagctggaacaaccgtgtatttggtctggtagcacctggctacaaaatggcgcaggtcgccgttgaccatattctcggtagcgaaaacgcctttgaaggtgctgaccttagcgccaagctgaaactgctgggcgtagacgtaggcggtattggtgatgcgcacggtcgcacgcctggcgcacgtagctacgtttacctcgacgaaagtaaagagatctacaaacgcctgattgtcagcgaagacaacaaaaccctgctcggtgcggtactggtgggcgataccagcgactacggtaacctgctgcaactggtgctgaacgctatcgaactgccggaaaacccggattccctgatcctgccagcacactcgggtagcggcaagccgtctatcggtgttgataaactgccggacagcgcgcaaatctgctcctgcttcgacgtcaccaaaggtgatctgattgctgccatcaacaaaggctgccacacagttgcggcgctgaaagctgaaaccaaagcgggtactggctgcggtggctgtatcccgctggtcactcaggtactgaacgcggaactggcgaaacagggcatcgaagttaacaacaacctgtgcgaacactttgcttattcgcgtcaggaactgttccatttgatccgcgttgaaggcattaaaaccttcgaagaactgctggcgaaacacggcaaaggctacggttgtgaagtttgtaaaccaaccgtcggttcgctgctggcctcctgctggaacgaatacattctgaagccggaacatactccgctgcaggattctaacgacaacttcctcgctaacatccagaaagacggcacctactcggtgatcccgcgttctccgggcggtgaaatcaccccggaagggctgatggcggtaggtcgtatcgcgcgtgaatttaatctctacaccaagatcactggctcccagcgtctggcgatgtttggcgcacagaaagacgatctgccggagatctggcgtcagctgattgaagccggcttcgaaaccggtcatgcctatgcgaaagcactgcgtatggcgaaaacctgcgtgggtagcacctggtgccgctacggcgttggcgacagcgtcggcctcggcgtggaactggaaaaccgctacaaaggcatccgtacgccgcacaaaatgaagttcggtgtctccggctgtacccgtgaatgttcagaagctcagggtaaagacgtgggtattatcgccactgaaaaaggctggaacctgtatgtttgcggtaacggcggcatgaaaccgcgtcatgcggatctgctggcggcggatatcgatcgcgaaacgctgatcaaatatctcgaccgcttcatgatgttctacatccgtactgccgacaaactgacgcgtaccgcaccgtggttagaaaacctcgaaggcggcatcgattacctgaaagcagtgatcattgacgacaaactggggctgaacgcacatctggaagaagagatggcgcgcctgcgtgaagcggtactgtgtgagtggactgaaacggtcaatacgccgtctgcgcagactcgcttcaaacacttcatcaacagcgacaagcgtgacccgaacgtgcagatggtgccagagcgcgaacagcaccgtccggcaacgccgtatgaacgtatcccagtaactctggtggaggacaacgcatgagccagtggaaagacatctgcaaaatcgatgacatcctgcctgaaaccggcgtctgcgcgctgttaggtgacgagcaggtcgcgattttccgcccgtatcacagcgatcaggtgtttgcgatcagcaacatcgacccgttcttcgagtccagcgtgctgtcacgcggactgattgcggaacaccagggcgagctgtgggtcgccagcccgctgaaaaaacagcgttttcgcttaagcgacggcttgtgcatggaagacgaacagttttccgtcaaacattacgaagcgcgagtgaaagacggcgtggtgcagctgcgcggttaatgttttaacgggaggcgcaatgcctcccctttttgcatggtcctgtaataatcttcggtatattgcaggacattttttaaactttttgttttattttttgtttttattttttaaaggataatcaaatgtttacagacactattaataagtgtgcggctaacgctgcgcgcattgcacgcctgtcggcaaataacccgctcggcttttgggtcagctccgccatggcgggcgcgtatgtgggtcttgggatcatcctgattttcacgctcggtaatttgctcgatccatccgtacgccctttggtgatgggcgcgacctttggtatcgccttaacgctggtgattatcgccggttctgaactgttcaccggacacaccatgttcctcacctttggggtaaaagcgggcagcatcagccacgggcaaatgtgggcaatcctgccgcaaacctggctgggtaacctggtcggttccgtcttcgttgccatgctctatagctggggcggcggtagcctgctgccggtagataccagcatcgttcactccgtcgcgctggctaaaaccactgcaccggcaatggtactcttcttcaaaggtgcattgtgtaactggctggtttgcctggcaatctggatggcgctgcgcactgaaggggcggcgaaatttatcgctatctggtggtgtctgctggcatttatcgcgtccggctacgagcactctatcgctaacatgacgctgttcgcgctctcctggttcggcaaccacagcgaagcctacacgctggcgggtattggtcataacctgctgtgggtgacgctgggtaatactttatcaggtgccgtattcatgggattgggttattggtatgctacgccgaaagcgaatcgtccggttgcggacaaatttaatcaaactgaaacggctgccggttaattactaaggggtttttacgtggatcatttgcctatattttgccaattacgcgatcgcgactgtctgattgtcggcggtggtgatgtcgcggaacgcaaagcaaggttgctgttagacgcaggcgctcgcttaacggtgaatgcattagcgtttattccacagttcaccgcatgggcagatgcaggcatgttaaccctcgtcgaagggccatttgatgaaagccttctcgacacctgctggctggcgattgcagcgacggatgatgacgcgcttaaccagcgcgtcagcgaagccgctgaagctcgtcgcatcttctgtaacgtggtcgatgcgccgaaagccgccagctttattatgccgtcgattattgaccgctcaccgctcatggtagcggtctcctctggcggcacctctccggttctggcacgcctgttgcgcgaaaaacttgaatcactgctgccgttacatctgggccaggtagcgaaatacgccgggcaattacgcgggcgagtgaaacaacagttcgccacgatgggtgagcgtcgccgtttctgggagaaattgttcgttaacgaccgcctggcgcagtcgctggcaaacaacgatcagaaagccattactgaaacgaccgaacagttaatcaacgaaccgctcgaccatcgcggtgaagtggtgctggttggtgcaggtccgggcgatgccgggctgctgacactgaaaggactgcaacaaattcagcaggcagatgtggtggtctacgaccgtctggtttctgacgatattatgaatctggtacgccgcgatgcggaccgtgttttcgtcggcaaacgcgcgggataccactgcgtaccccaggaagagattaaccagatcctgctgcgggaagcgcaaaaaggcaaacgcgtggtgcggctgaaaggtggcgatccgtttatttttggccgtggtggcgaagagctggaaacactgtgcaacgcgggtattccgttctcggtggttccgggtattaccgcagcttctggttgctctgcctattcgggtattccactcacgcatcgcgattatgcccagagcgtacgcttaattaccggacacttaaaaaccggtggcgagctggactgggaaaacctggcggcagaaaaacagacgctggtgttctatatggggttgaatcaggccgcgactattcagcaaaagctgattgaacacggaatgccaggcgaaatgccggtggcaattgtcgaaaacggtacggcagtcacgcagcgcgtgattgacggtacgctcacacagctgggagaactggcgcagcaaatgaacagtccatcgctaattattattggtcgggttgttggcctgcgcgataaactgaactggttctccaaccattaatttaacccgggccagagaattctggccgtcttaatgactctttttatatattcagcaaataaaacatagccccttaataaatattatctgctaatggattatattcaccgttacagcgacttacaaaattaagtcattcgctcactgacgccaattaaatattcctgtatcgttcttaacgagcagtctgcttatattcatataatcaatgaatattaattaatatataatacatagggaatgtaaatgaacaaatttattaaagttgcactggtaggtgcagtactggctacgttaactgcatgtactggtcatattgaaaaccgtgataagaactgctcttacgactacctgctgcacccggcaatttctatttctaaaatcattggcggttgcggtcctactgcacagtaagtctctgacagaaatcggctaacaccggtttaattgcccgacgccctctggattttccgagggcgtatttgtttctatgtccttcttgcccccgcccgtaaaaatattttcactttaaattcaatttgataactacatccattagccacagcgcgatcctgtgcgaaattttgtgatcttcctccacattacataacatcatatgttgttatattcatcatgcattgtcatgttaccttttaaatgactgcaaactctcccctacaacgtattggacaagaaaaaggtatcgctatgggaagccaggaactccaacgcaagctcggattttgggccgttcttgcaatcgccgtcgggacaaccgtcggctccggtatttttgtatctgtgggtgaagtggcaaaagcagcgggcacgccgtggcttacggtgctcgcgtttgtcattggcgggttaattgtgatcccgcaaatgtgcgtctatgcggaactatccaccgcttatccggaaaatggcgcagattatgtttatctgaaaaatgccggaagccgaccgctggctttcctctccggctgggccagcttctgggccaacgatgcgccgtcattgtcgattatggcgctggcgattgtcagcaatcttggctttttaacgcctatcgatccgttgctcggtaaatttatcgccgccggattaattatcgcctttatgttgctacacctgcgctccgttgaaggcggcgcagcgtttcagacgctaattaccatcgccaaaattatcccgttcactatcgtcattggccttgggatcttctggtttaaagcggagaattttgccgcccctaccaccactgcaattggcgcaacgggcagctttatggcgctgctggcggggatctctgccaccagttggtcgtataccggcatggcctctatctgttatatgaccggcgaaattaaaaaccccggaaaaaccatgccacgagcgctgattggttcctgtctgctggttctggtgctctacaccctgctggcgctggtgatttccggcctgatgcccttcgacaaactcgccaattctgaaacgccgatttccgacgccctgacctggatccccgcactcggcagcaccgctgggatctttgttgccatcacggcgatgatcgtcattcttggttcgctttccagctgcgtgatgtaccagccgcggctggaatacgcgatggcgaaagacaacctgttctttaaatgcttcggccatgtgcatccgaaatacaacacgccggatgtctccatcatcctgcaaggggcgctggggatcttcttcatcttcgtttccgatctcaccagcctgctgggttatttcaccctggtgatgtgtttcaaaaataccctcaccttcggctccatcatctggtgtcgtaaacgcgacgattacaaaccgctgtggcgtactccggctttcgggctgatgaccaccctcgccattgcgtcaagcctcattctggtcgcctcaacctttgtctgggcaccgattcccggccttatctgcgccgtcatcgttattgctactggtctgcctgcttacgccttctgggcgaagcgtagccgccagctcaacgctttgtcgtaatgttatctggagaaaataaaatgttggatattgataaaagcaccgtggactttctggtcaccgaaaatatggttcaggaagtggaaaaagttctcagccatgacgttccgctggtgcacgccatcgtggaagagatggtgaagcgcgacattgatcgtatttatttcgttgcctgcggatcgccactcaacgcggcgcaaacggcgaaacatctggcggatcgcttttccgatcttcaggtctacgccatttccggctgggagttctgcgataacaccccgtatcgcctcgacgatcgttgcgcagtaattggcgtttctgactacggtaaaaccgaagaggtaatcaaagcgctggagctgggccgggcctgcggcgcactcactgcggcgttcaccaaacgcgcggatagcccgattacctcggcggcggaatttagcattgattatcaggccgactgtatctgggaaattcacctgctgctctgctacagcgtggtgctggagatgatcacccgcctcgcgccgaacgcggaaatcggcaagatcaaaaacgatctcaagcagttgccgaatgcgctcggtcatctggtacgcacctgggaagaaaaaggccgccagcttggtgaactggccagccagtggccgatgatttataccgttgctgcgggtccgctgcgtccgctgggttacaaagaaggcattgtaacgctgatggaatttacctggacgcacggctgcgtgattgagagcggagagttccgccatggcccgctggagattgtcgaaccgggcgttccgttcctgttcctgctcggcaatgatgaaagtcgccacaccaccgaacgcgccattaactttgttaaacagcgtactgacaacgtgatcgtcatcgattacgccgaaatttcgcaagggctgcacccgtggctggcaccgttcctgatgttcgtgccaatggagtggctctgctactacctgtctatttacaaagatcacaacccggatgaacgccgctattacggtggtctggtggaatattaatccctctcccggcccggcaacgggccggatttacgcaaggagttacccgatgaaaacaggtatgtttacctgcggccaccagcggctgcctattgaacacgcatttcgtgatgcaagcgagctgggttacgacggcatcgaaatttggggcggtcgcccgcacgcgttcgcgccggacttaaaagcgggcggcatcaaacaaatcaaggcgctggcgcagacgtatcagatgccgattatcggctatacgccagaaaccaacggctatccgtataacatgatgctgggcgatgaacatatgcgtcgcgaaagcctcgacatgatcaagctggcgatggatatggcaaaagagatgaacgcgggttatacgctgatttccgcggcccacgcgggctatctcacgccacctaatgttatctggggacggctggcagagaacctaagcgaactgtgtgagtacgcggaaaacatcggcatggatctaatcctcgaaccgttaacgccgtatgaatcgaacgtcgtgtgtaatgctaatgatgtgcttcatgcgctggcgctggtgccttcgccgcgcctgttcagcatggtcgacatttgcgcgccgtatgtccaggcggaaccggtgatgagttatttcgacaaactgggcgataaattacgtcatctgcatattgtcgacagcgacggggccagcgacacgcattacattcctggagaaggcaaaatgccgctgcgggaactgatgcgcgatattattgagcggggctatgagggttactgtacggtggagctggtgacgatgtatatgaacgagcccagactctatgcccgccaggcgctggaacgctttcgcgcgctgctgccggaggatgagagatgaaaaccctggcgacaatcggcgataactgcgtcgatatctacccgcaactgaataaagcgttttctggcggtaatgcggtcaatgtggcggtgtactgcactcgctacggcatacagccgggatgcattacctgggtgggtgacgatgactacggcacaaagctgaagcaggatctcgcccgcatgggcgtcgatatcagccatgtccatacgaaacacggcgttaccgcacaaactcaggtggaactgcacgacaatgatcgcgtttttggcgactacaccgaaggcgtgatggccgactttgccctgagtgaagaggattacgcctggctggcgcagtatgacattgtgcacgcggcaatctggggacatgcggaagacgcattcccacagctgcacgctgcgggcaaacttaccgctttcgacttctccgacaagtgggacagcccgctctggcagacactggtgccgcatctcgattttgcctttgcctccgcaccgcaagaagacgaaacgctgcgtctgaagatgaaagcgattgttgcccgtggcgcaggaacagtgattgtcacgctgggtgaaaacggcagcattgcctgggatggcgcgcagttctggcgtcaggctcctgaaccggtgacggttatcgacaccatgggtgccggagattcgttcattgccggattcctttgcggctggtctgcggggatgacattaccgcaggcgatagcgcagggaacggcgtgcgcggcgaaaaccattcagtaccacggtgcctggtaggtataacgttggcgtgagcatcttcacgccaacgtgctgttacttgccggaaaacgaccctataatccgagtaattcattctttatttcagggtcgattatgtcagctacggaccgctactctcatcaactcctctacgctaccgtccgccagcgactgctggatgatatcgcgcagggggtttaccaggccgggcaacagatccctaccgaaaacgagctttgtacacaatataacgtcagccgcattaccattcgcaaagccatcagcgacttagtggcagacggcgtactgatccgctggcagggaaaaggcacctttgtacaaagccagaaagttgaaaacgccctgcttactgtcagtggttttaccgattttggcgtctcacaaggcaaggcgacgaaagagaaagtgatcgaacaggaacgggtcagcgccgcgccgttttgcgaaaagctgaacatccccggaaacagcgaagtgttccatctctgccgggtgatgtatctcgataaagagccgctgtttattgatagttcatggatcccgctgtcgcgttatcctgactttgatgagatttacgtcgaaggaagctccacctatcagttatttcaggagcgttttgacacgcgagtggtcagcgacaaaaagaccatcgatatctttgccgccacccgcccgcaggcaaaatggctgaaatgcgaactgggcgaaccgttgtttcgcatcagcaaaatcgcctttgatcagaatgacaaaccggtgcacgtctccgaactcttctgccgcgccaatcgcatcaccttaactattgataataaaagacattaaccgtaggccggataagatgcgccagcatcgcatccggcgatgctggcgcgttgaattttacatcccgtacgttcccctcaccctaaccctctccccaaaggggcgaggggaccgttcagtacggaatttagcttgacggtgctatccagcattaaatactggcaatactctcacgcaaaatccgcagcaccgtctcttcaccgctgcgattcgggttaatgcgaatcgcacaatgttctgattgtggattcgcctggcgaaacgttccggaaaggcgataaaagagcggcgggatttcatatttcgactctgcacccaccgggtaaggcaaggcaccgcgcttttgcgcctcttccagcactctggcggcaatcggctgatgaaactcgacaatcaacaccttcgactgcgcattagcaatcaccgcgcttttcacttccggcaccgcaccaccgttaagcaaagccagcaaccgttcagatacccctgcctgcaccgcgtgcatcactggcgcaaacaccagaccacgcaatacttccagcgcctgtgcgccctggatctggctaccgccggagtaaagcgtggcgcgaatacggttgataacatcagcatcgccgaccactgcaccaacaccctctggcccaaatagcttgaagcaggaaaatgtcgagacattcgcgccgcattcacagccgattcgagccaccttcatcaccgcatagttgtcatcggttaacgctggaacacctgccgcgcgcaacgttgccagcacatctgccagcacgtagctgtcctgcggctgctggcgcgtatgctgcaccagcgccgcatccggttgttgctcgtcgacgacctgcttcagtgccgacaggtcattgaaatcaacagtaataagcgtcagccccatctgctcaataataacccgtgtcgtcgggtaaacaggcgcgtcatgcaccagaagacgctgccccggtttgagcaaagccgccagcccggcgcgaatcgcgccagtccccgcgccctgcaccagcgccgcagcctgtgcgtgaaatgcatcagccagcacctgttccacacgctgggtaacgcgcggttgattcagtcctggcgttaagcctaaatcaccgccagtaagaaactcgctgccggggaaatggcgacagatgctatccaccagcgcaaactgcttttgctgcgcctcaataatcgtcaggctttgcagaggaaacgtcttcataggtgccttccttaagccggaacgaacaggccaagccagtaaagaacattcagcagaataccggtgatcattactgccacgaccggtgccgccattttctgtaccggacggcccagggattcgttgaggaagtaaatggcaaccgcgatagagaatccggtataacccgccatcttaattgctgcgaaaatcgaaccgaccagcagcgccacttccatcagcatattcatggcgttacggatgttatccgacgcattacgcaccgacgggtagcgtcccagccatttgccgatcgaacgaagcagcaagacttccgccgaaataaccactgcgcctaataccgctgcaaccatcggattcggcgagagatagcccaccgcataaacaaaggtaaagcccgcaactgcatacacacccgttgctaacgcggtggtggcaatcaacggcacaaaccccagtccgcgcataaattctgccagagccgcctgattaatcagcgtttgcgattgttccggcgttacgcctgcggaatatgctttctccagtgtgaagatcgacacttcactgccagcaaaaatcttcatgctggcaacggcggcaatcaatgctcccacgatggcgatatagggtaagtttttgataatccgtgacgtgcgttcttcaaacaccgaaagcccgctggcatcaatgtcattttcatcacgatgacgcaggtcgtgagttatcgcgatccccagcagcatcaccatgccaataaagatttcgatggattcagggttaagatgtgggaaatagcgcacgactaccacacgggtcatcagtaccaccacggcggcgatcagactttgcttccagccaaactggtagaaaatcgccaccagcgggaacagtgcaaaagctgaaaccaccggcgagcttaattcccccaggctacctaatacatccaccggcagcgcggtcagcagctggtttactggcaacaggcaagtaaggatcaacacgccccagatagcgccaagaccaaacgccatcaggctgtttatcgccaggacgccgaggatatcggtaggaagaaagagtaaccatgcgttgagcagcccggttttcagggtaaaagagatccccaccgaggccacaaaaccaatgctcagaccaaaagcgatactccccgcctcgcgacggttcatatagccttcaatcagttgcggcaggatcgggcggatgccgtcatgaaaaacagccgccgagcgatgcgccagaagcgatgtcatacccgtcaggcacgccaccacgataatctgaatatacagatccatagtcgtgccttttatttcagatggttaatcagcatcggaatcgcgtgttcgacgtgctcaacggaaaggccaaacgccacttttccttcagcgatcattttggcgatatgctcgtctttcgctttaatgcctggtttggcaatggtgcaacttttgttatagcctatcaccgcgatggcaatcgacaatgccgcgcccgcaccggtattacacgcgccgatgtaataatccagttgcccggatttcaccttcattgccgcttccatgtcgttgtgaatgaaaacttcaaaacagccaggagccgtcgcttcaatagtttttttaatctgctcacgctgtaagcctgcaacgccaatctttttcatgagtctgtccttattggaaaaattgagagggattttcacgtaacatcacatccacatcggcctgactgaatcctgactggcgcaattgcggaataaaggtggttagtaaatagtcatagccataaccaccgttggcttttaaatgggagcggcgcgtaatatccatcgacagcatgacgcggttcagcaacccacggtcgcgtagcgcatgaagcatcgcaatacgcttttcgtccgggtagtaactgttcttgccgatggtgtcgaactgcacgtacgcgccgagatcgatcatcttcaaaatgttgtcgaggttgtctttcagatcgcagtgaccaacggtgacgcgcgaaagatcaaccccgtgggcttgtagcaacgccagttgctccagccccatcgtgctgaacgacgtatgcgtggagatcgggcgtccggtctggttatgcgccagcgcagcggcaataaataccttctcttccagcggcgtaatctttccttcgctggtgccgatctccgcgatgatcccggctttcagctccgtgccatcgataccctgttcaatttcatcgaccatctcctgcgccagttcctgcacgctgcgggtcgccacatgttccgggaaaaacgcgtcctggtaataaccggtacaggccaccacgttgatccccgtctcgcgcattacacaagcataaattgcgcattgcgccccatgtaacggttggtcatctcaatcacattacgcacgccccgggtcatcaggtcgttcatctcctggcaaatgaacgcatactgatcaaggcggcagtccacgttgtttttaaagccggagagatcaatatgcagatgctcatgggcgagggtgtaacccgtcggatcaaaactcatagggtgtctcctgcaaaccggagggaggaaagaaaagagcgaccattttgtggcggtggcgcgcggaaaaattcacacacggtagcccccacatcagaaagcgtggtgcgcacaccgagctgcgtagcgatcatcccttgctgataaaccagcactggcaccacttcgcgggtatggtggctgtgaccaatggtcggatcgttgccgtgatccgccatcacgaccaggcaatcatctggctgcatcgcctcaacaagccgggcaaggttacggtcaacgacctgcaaacgttcggcataacgtgcgacgtcttctgcatgaccagcgaggtcggtttcctgaatgttggtgcaaataaacgccgtcggatgggtgttaaattcgttgagggtgatatccataatccgctggctatccaccagattttgccagctcacgccataaggattgttgacgatatctgccaccttacccaccagcacggttggcacgcctgcttcatacagtttttgtggcacctgcactttttcatcgacgccatagcccatatgcacgacctggaaaccgttgtcataagcgccagaacgcggcgcattgataccaataaagcgcccttctttgctttctgcggcatcgagaatgcgttgactgtcggttaacaggccaccaaatgtaatgacccgaccgacctgtacctgctcacgcacgatacgaccaattttgattgcgtcgtcaaaagagatcacagagagattggcggtaatgttatagacctggcctaaatccgcctcgagattatcgccaatcgcaaccgcctgattgacccacagaaattgcagatcatcgccacggcgctccacctgccagccagcggaaactaatgcctgctcaacacggtcaatcacatcgcgaaaaggcatccgcagcggcggtaacgggcgcgtgcctaaaatttcctgatgccccataaaggtatcgccaccttcatgttgcagctctgccacgccccaggttgcggaatctgacggctgcatatcgcctggcgcataacccaatgcgttgattagccccagcttctccagcgttggtagctgcaaatgcggcaactggctcaggatgtgaccacatgtattcgctcccgcatcttgcggacgcaccagcgtgacatctttcattgcccctacgccaaagctatcaatcactaacaccacaaatcgcgccattacgcccccagagagtttccaagactgtcataacgaccgacgatttccggttcgccacgatgaataccggacaccagcaccacatcgctacgggtgacaaaaatctgcgtgcgaaaacagagcaccactgcactgcttaccggaaactcgcctgccagcggcagggtgtagtcgatactgctgtcatccacagttttgagattggtttcagtaatcttttgattttctggcgtaaacaccaacgcatgttgcacatgaccacgacgatagtaaccgccgccgtagcagtagctgtcgccacggaaatgatgggagatttcacttaaccagagcatcgcgatacgttcaggctgatcgccctgctggtttgccggaatagtgcccgtcagcgcatgaccgggttcggcatgagtcacaccgtattgcgccagtaatggcagcgaagtgcagctggtcgctgaaggcgcgttcagttgctcaagtgcaataccagatttcgccagttgatcccgtgcctgtatcagcgtgtgaagattcggtgtcggcaaaacttttccgacagcctcatcccaaagcaggcaagggaaatgggtaagtccggctaaatgcagccctggcagattctggatttcggcgacaatctccggcaacaccttgagggcaaaaccgctctcctggcccggataaagaaaatcatcgtcgctataaactttaagcagcacagactggattcgcccggccttcaccgccgccgcagaaacttcccgcgctttgtcgagagtaaacacggtgatgacgtcggtgccctgttcaacggcgtcagcaacctgatgacaagggatttgtaccagatgcccctgatgcgccacaggcaaaccagcgcggcgcatgactcgcgcctctttgtaatccaccgccacaatgccgctgtagcctaatgccagcaatttttccgccagccacggattacgaccaaactgcttggtcatcagatacagttcaatgccgtaaagccgcgccgtctcaatcagccgcttaccgttttccagtatctgatccacgtcgatcacccagctgtccggggcgatcttgccctgctgccacaggcttagtgcggcggaaatcagcgccgggttctggcgtttcaatgcttctacaaacatcttgttgcctcgtttctgttccttgaattaaatattcatttttttgaatatttaggttgtgcgacgtggatttgtcgggagcttcaaacctcttcgttagcagccatccataatccataaaggttggccagcaaatagccttcttcacacaggttaacttccagtgcgaattccttcaacaacacctgatgcaattgcacaacggcttgccagtggctggattgcgccagttctgccagcaactcgttatccagcggctctatttcttcaccacggcgactgcgcatcagtgcactcgccatatgtgtcatcgccatcgttccttgctcactgcgcaccggcagatggcactctgtttccagtacgttgacgacctgcatcatgcctttgcagatgtccttatcaataacgcctgcctcgcaaagcaggttgagtctggtttccatatcagatgcctttcgtttaataactcggttcctgttccccactcactacccgttgttgatgggcgagcagggcgtgtttatctacaacggcacgcagcagttgttgcattgggtaatcatcgactcgcgtcaggaccacggcttcggtggcctgtaaaaatcgcggatcgtctgtgagcggcgtcgcctctaatcccagcatggtcagttcgttttccgccaccacgttccagatcaccgcatcgacatcgcctttaacaatgcgttgtaaactctcgtgataagagagatcgactcgttccacatcactaccgccaaaaaaaacatcggtcatgattttctgatccgccgaacggttatccagccccacgcgcttcacgtttgcggactcgcctttacggcaaatcaactggtgctcgccaacgtaggtgtgcggccccaactccagcgcgaggcataagcctttttgcgtgagataactttccgccgctagtcgcgaaaccaccgccatgtcatacacgccattaagcagacactccacgcgaatatccgcgccacgcatgtgcgcatagtaaaaaggaatgccatcaaactgggctttcaatccgctcgccaggccttcgtacaaacgggtatagggcaagggcattgcacataccacgttgttgatatccacatgagtcagcaatgctttgttatccatctcgaccagataactgccattgcgcccacggcgttcaatccgtatcgctccgcttgattccagcgttttcaacgcggcctgcgtcaggccaacggatgaacggcattcatttgccagctcatctatggttttcaatcgattaccgcacttttcacccaacaaataacgggccagcgtcgtgatgacgacgccttcttttttgataaacgttcgacgcataataaattttcagtaaattgaatatttatatcttcaggaatttgaagataaggcgcaacagcgagatgtggaaacggcgaggcacttcacattttttcggattattgcaaatgaggataaaaaaaccgggttccccggtttcagagtgatgataaaagcaaaattgcctgatgcgctacgcttatcaggcctacatttccttgcaatatgtgcattactttgtaggccggataaggcgttcacgccgcatccggcatgaacaaagcgcaatttgccagcaatagtgaattacggcttcgccacaaaaccaatcgcttcgtacaccgcttttagcgtacgggaagcgtgcgcgctggctttttccgcgccatctttcatcacctgttgcaggaaggcttcatcgttgcggaaacggtgatagcgttcctgcaattcagtcagcataccggaaacggcatcagccacttcacctttcagatgaccatacatcttgccttcgaactgtttttccagttctgggatgctctggcccgttaccgctgaaaggatatccaacaggttggaaacgcccgctttgttctgcacatcgtagcgaactaccggcggctcgtcggagtcagtgaccgcacgtttgattttcttcactaccgatttcggatcttccagcaggccgataacgttattgcgattatcgtcagacttggacatcttcttggtcggctccagcagcgacattacgcgcgcgccagatttcggaataaacggctccggcaccttaaagatctcgccatacagcgcgttgaaacgctgggcaatatcgcggctcagttcgaggtgctgtttctggtcttcacccaccggtaccagattagtttgatacagcaggatgtccgctgccatcagcaccggatagtcaaacagaccagcgttgatgttctcggcataacgcgcagatttatctttaaactgcgtcatgcgactcagttcgccgaagtaggtatagcagttcagtgcccagcctaactgtgcatgttccggcacgtgggactgaacaaaaatggtgcttttctcaggatcgataccacaagccagatacaaggccagcgtatccagcgtcgctttacgcagcttctgtgcatcctggcgcacggtgatcgcgtgttggtcaacgatacagtaaatgcaatggtagtcatcctgcatgtttacccactgacgcagcgcacccatgtagttaccaatggtcaattcacctgagggctgtgcgccactaaaaacgatgggcttagtcatttttcgattcctgattttcgctatgcggaagccctaatgcgggcagaaggtcatttatagactgataaattacatcaggctggctgagatcgatagcctcgccgtagttatatccgtaggttaagccaactgatgggcaacctgccgcttttgccgcctgaatatcattgcgtgagtcgccgacaaacagcatctgttgtggggcaattcccatccgctcagccaccagtaacagcgggtccggatgcggttttttgttttgcacatcatcaccaccaatcaccacgctgaagtatttggcgatatctaaggcttcgagcagcggcgcgacgaacggcgtcggtttgttggtgaccaggcctagcggcaggcctttagcctgcaacgcgcccaacgtatcggcaacgtgcgggaacaaaaacgtcccctcttcggcaacctcgccatagtagcgatcgaacagtttacgcagaatacgtacctgttcttctgccggaatgtcgtcatcaacgggcggtttacccattgttttacgctgagtcgcacgttcctgacgcgcccaggtcaatgcgcgctccatcagaacatctgcgccgttaccaatccaggtaataacgcgttcttcacctgcgacgggcaactccagcgcatacagcgccatatctaccgcagcagcaagaccaggagcactgtcgaccagcgtaccatcaagatcaaaagcgacgccgcgaatatcttcaaacttattcatgacttacctttgccagttcactgcgcatttcatcaatgacttttttgtagtctggctggtcgaagattgccgaaccggcgacgaacatatccgcgcccgccgcagcgatttcgccaatgttgttcaccttcacgccaccgtccacttctagtcgaatgtcaaagccagactcgtcgatacggcgacgtacttcgcgcagtttatccagtgtttgaggaatgaaagactgaccgccgaaaccagggttgacggacatcagcaggatcacatccagcttatccatcacgtaatccagatagctcagaggtgtcgccgggttaaataccagacccgctttacagccattttctttaatcagttgcagcgtgcggtcaacatgctcggaggcttctggatgaaaggtaatgatgctggcaccagcggcagcgaaatcaggcacaatgcgatcgacgggtttcaccatcaggtgtacgtcgataggggcggtaatgccatagttacgcaaggatttcagcaccattggcccaatcgtcagattgggaacatagtggttatccatgacgtcaaaatgcacgacatcagcgccagctgccagggcttttgcggtatcttcacccaggcgggcaaaatcagccgacagaattgagggggcaatcaaatactgtttcatccgcttctccttgagaattattttttcgcgggtgaaacgactcctggtttgtacaaagccagcagttcgtccacctttttacgtgtgccgccgttgctgcttatactgcgtcgaactttgacgacatgcaattttgcgcgctgataccactcacgcgttaacatcgtatcgtgattggagatcagcactggaatatggcgctcaaccagaccttcggcgatctccgccagatgcgcttgttgttcaagcgtaaaactgtttgtgtgatacgccgtaaagttggcggtcgcagacagcggtgcataaggcggatcgcaatagacgacggatgcatcatctgcgcgcgccatgctatcggcgtaagactcacaatagaaaaaggcattctgcgctttttcagcgaagtgatacaactctgcttccgggaaatagggttttttgtagcggccgaacggcacgttaaactcaccgcgcagattgtaacgacacaggccgttgtaaccgtagcggttcaaatataaaaacagtaccgcccgacggaacggatcctggcttttgttgaactcttcgcggaactgatagtaaacctcggcgcaatttgtttcgggaacaaacagctcgcgtgcggcctgtacgtactcatcagtacgcatcttcacaatgttatagagactgatcaggtcgctattgatatcggcaaggatataacgagaaaagtcggtgttgagaaacaccgacccggcacctacaaaaggctcaaccagacattcgcccttgggcaaatgccgtttaatatcatcaagcaggggatacttgccccctgcccacttcaaaaaagcgcgatttttcttcatgctgactaactaattacaccttctccggctgtggagaaagctccgacagcatccagcgcttcaggcaactcccgcaacgataaaccattgcgggagataaccttgattacttcagatcggcctgtacctgacgcagcggtttcgcccacgggtttttggcctggacatctgctggcaatgtagataccgcttttttcgcctcttctttcgaagcgtacacgccagaaaccaggacataccacggctgaccattacgcgtcgtttcatagacaacgtagtttttcagattctctttcttcgcccaaccgttcaggttgtcgtagttagaggaactgctcagctgcagagtgtaatggctggacggtgccgatttcaacgaaccaacattacctgcggtcttcgccccagcagcgggtgttgccgtggtttgcgccggggatgccgtctgtactggagccgtagtcgccgtctcttttggtgctggcgtagaagtcgcagccggtgccttcgtgctcgccacaggggcagctggttcagtacgcttcggcgtctgtgctaccggcttcggctccgttttcacggttgcttgcggttttttcggttcaatcaccgcctgctgacgagctgggcgcgtagtggacggacgttcagcggtttgcgttttcgccgtgtcacgcgatgcattgccattgcgaacaggcgcaaccgttgcgggttcagtcggcaacgtggaattgaccgccacattgttcagctgttgctgattttgtggctgggtcagcgcattgttcaggtcaccctgcacttcaacacgttgttgaccatccgttgccaccggggtttgcccttgagtcggcgtagaagagatcggtggcagagaaacatcctgctgagtattttccgcagacgtggttcccggcgctggctgcacgccattcgcctgatcggtcgcattgccagcaagatcaatactcttctcgccagacgcggtttgatcgctggaagtggtcgagggggcttttagcgcagaaccgataccgatgatcaacagcagtagaaccagaatgccgacgcccatcatcatatactgacgagaagcgggtttactggctgcttttttgcgcttacgcggacgacgctctacgcgctcttcatccacggtttcatcttcggattcgtcaatttcttcttcgatttccggttcctcattgcgctctttttgcgcacgagtcggacggcgatcgtcagtgtcatcaagttcaatatcatcaaaattgatctgcggttcgccacgttcagtacgctcagaacgttcagaagattgacgagaacgaccagtacgacgatcgctgggatcgggtttcagctcgtcttctggtttgaattcatccatttaacaccccactaaaaggttaatgcttaccacgttgcaattaacctgaagctaatagaccgcttgataagcggcctgacctttcttgttgttacgctgattgacaatcggcaatggcgttaagaacaagctcgtgcgaaacgccgctgcgaacttcactcttaccaattgccaacggaagaattaagcgcatctctcccgcaaggactttcttgtcacgcagcatatgcggtaaatacgcctgcgcggacatttcgcgcggcccattgaccggtaacccagcccgcttgagcagggttataatacgctgcgtttcggcagaactaaactgcccgagacgttccgacgtccgcgccgccatcaccatacccgcagcgaccgcttcaccatgtaaccaattgccataccccatttcagcttcaatggcatgaccaaaggtgtgtcccagattcagtaaagcacgtaacccggtttcgcgctcgtcggcggcgacaacttctgccttcagttcacaacaacggcgaatacagtacgccattgccggaccgtccagacgcaacaacgcatccagattctcttccagccagttaaaaaacgcaccgtcaagaataatgccgtatttgatgacttctgccagccccgacgctaactcacgcgggggaagcgttttcagacagtcgagatccaccaccactgaagcaggttggtagaacgcgccaatcatgtttttaccgaggggatggttgaccgcagttttgccgccaacggaggaatcgacctgcgacagtaacgtcgtcgggacttgaatgaaacggacaccgcgctgataactcgccgccgcgaagccggtcagatcgcccactacgccgccgccaagcgccaccagcgtagtatcgcgaccatgcggtttttgtaacaacgccgtaaagacggtatcgagtacagccaggcttttatactgctcgccgtcagggaggataacgctatcgacgttaacacccgcctgttcaagtacgccgcggaccttatcgagatacagaggagccagggtttcgttggtgaccaacatgacctgctcgcccgatttcagcggtaagaatgaagctggttcattaaacaaaccagatgcgatggtaattgggtaactacgttccccgagagtaacgacaatcctctccataacgcgacatccaccttaattactgtacccgcagacgagtgtatataaagccagaattagttgctttccagcatgtgaataatctggtttgcaaccactttagcgctttgatcatcagtacgaatggtcacgtcggcaatctcttcatacagcggattgcgttcattggccaacgcttccagaacttcacgcggcggtgtttcaacgtgcagcaacgggcgttttttatcacgctgcgtgcgtgcaagttgcttttcgatggtcgtttcaagataaacgacaacgccacgagcggaaagacggttacgcgtttcacgggatttcacagagccgccgccagtagccagcacaataccctgtttctcggtcaactcattgatgaccttttcttcgcgatcgcggaagccttcttcgccttctaaatcgaaaacccagcccacatcagctccggttcgtttctcaatctcttgatcggaatcgtaaaattccatattgagttgttgagctaactggcgcccaatagtgctttttccggcacccataggcccaaccagaaagatattgcgtttctctgccattttttcggtactactaagactattcgttaatgataaacccgcttcgctcagagagcgccgcaggacatgaactgaaacctcataagatattgcgagagtcagactgaaaattatctcaatactccagcgggtttggcaactgaataaatcacccatccctctgcatatctggtcgctgcaagcgcgctgccttgctaccaccgctctggcgataaatcaccgggtaagattagcgtaaaaaagacagcaaaatgccgcctgaatgataaatcatcatcatggaacgcaggcagcgaagagcaccaactctcaaatcggtactccttgtatgctaaatacctgcgcgcgtcaaatagatgaaacacgttcagcgtaaaaacattaccgcttttacggctgtttactcactggaaaccagtcgtggcgtgataaacaccactaactcgcgtcgttcatcttcttttccgtcatgacgaaataattgcccgaaccagggaatgtcgccaagcaacggtacgctatcctgacccgatttatttttacgggtaaaaatgccgcccagcgccaacgtttctccgcttttgacctcgacctgcgtttcgatctcctgcttatcaatcgccagcacttcgccatcggcctgctgtagcacctgccccggaacgttctggctgatgtgtaatttcagccggatgcgacctttttgtaacaccgtgggcgtgacctccatccccaggacggcctctttaaattccaccgacgtcgcgccactttccccgctggaaacctgatatggaatttcgctcccctgtttaatgctggcaggctgaagatgtgaggccagcagacgcggactggcgataatatccagctgctgtttttgttcgagcgcggaaagctcaagatccagcaagcgtccgttgatgcgcccaatgttaaaaccgacatgcgttgtcgccgtcgctacggagaggtcgctaccaagcgtggtgacttgcccaacgccaccagcgtgttgcgcatcggccagcgtccatttcacgcctaactcacgcaaacttttttcattaatggtgacaatatgcgccgacagctcaacctgcccgaccggcagatccatttgcgctacccactgttcaagcgcgcttaacgccgttttgttatctcgtagcaaaaggcgattggtgcgtttatcgacggtcatactccctttggcactcagtagcttctcccccgctttcgccagttctcccgcgtcggcgtattgcagggttatactgcgattttccagcggcagatttgcctgcgcccgcgcctgctccgcctcctggcgggcgatattgttattctgccaggcaatggaatgcactgagagaatgttgccttcctgccgcgttatcagtccggcgcttttcactacagtttgtagtgcctgcttccagggaacatctgttagatgtaacgacaccgtaccgctgacgtctggcgacacgaccaggttcaacttctcctgttcagccagcgcctgcaacacctgagctaccggaacgtcatccaccatcagcgtcactttttgcggctttgccgcctgtacgccgggtatcagcatcaacagtagtgcggctatccattgcttcatttgtatctccttgccgttgccacaaccattgtggcggttcgcagtttgtcccggtacccagcgttagtacgtctggcgtcagctgtaaaattgtccagccgttttccagcacatcgttttgctgcacccgtcgccatttcttttgcccgtcttttattacaccgatgatgcgctcgcctcgccctaccatcccctgatagcgccactggctaagttcgctaatccggcatagatcttccggcggtttaaaagggtcacgcataccggttaaaaggcacaatgcaatacctgccaacaaccagcgtttaaccctcatgcggcgtctccagttgtagcgtgaacaaaagatcatcaccttccacgcttaacgaaaaacggctcacgctgacgttgcgctctgccagccgtgtaaatgccgacggcactgcttcccacagcgttttcaacgccaactcgcctccctgcgcggatggatgccaggaaaccagttgcgcgccggataactgaaaatccagtggcgaaaagggcagcgttttttcctcgctgaagggagtggtgtctaccaggcgatacagtgcggcccactgctggtgatgacttgcccgtagtcgaattaatgcgtcgcgctcttcatggtgtgtcgatgacagaaaaatgagcgtaactaacatcagcaaccagaatgcccagcaaagctggcggaggcggggtgatgtggcgaaccaccagtcaaagaacatgttcatcgctaaccttccttgttaactgatactcaaattgccagcgtccctgcgcatcctgctgcgtggctccccgctgattgagatgaaaagatgcatcctggcggagtgacgtttctagtgcgtttaacgcggtaatgcttgttgtcagccccttgatctccagcgttccctgctgccagcttatcgttgtcagccaggcgtgctcgggtaaaagcgccgccagtgcttccagcgcagattgccagtcgcgggtaaattgtcgctggcgctgccgttgcgaacgctgttcgcgtaactgctgttgctccagcaaacgtggcttcgttatctgtaagctgcgggcgagttgttgttccgcctgaagcaaaactgcgtctatgcgcgcttcggcgctgcctgtcagacgcagtattagcgttatcccgacggccagcagcagaggcgcaacgaacatcagcaaccagaaacgcagaaaagcggtccggcgttgctgtcgccagggcaaaaaattaattggcgggttcatcagtacgccttcccaagcgccagccccagcgcgatggcaaagtctccacctggcggcggtagcggcggctgacgaacagaaacggcctcccagggatcaaatccgccttcgccacatatcgcgacgctttcgggatcaacggataacgctgccgccagctccttcgcgctagtcatccccaccgccagtttgcgcccccagctatagcgcgtcgcccacagccactgttcgttatcacgccaggccagacattgctgatgagaaggtaaaaaaggcaggaatcgctgtaatgcactggcatccggggtgatcgcgctcacatgaacacgcaacctttctgccagagtaagcagcgttgccagctctttgctttgcgcggcagtcacgttataggcgggactgagtgagtcttcgctgtaatcgaagcgcagggagtccggatccatatccagctcgcgggccatcgtccctgacagccaggccgtttgctcccgctcaccaagggacatcgacgggcgcggaaatgaccgctgtaatgtgcgactggcgggaaacgccaacataatgtgatgacgctgcggcagttcgcgactccacggtaacaacgttttagccagctgctgcgcatcaacaatccgcccatctttgataatgtcgttctccagcggcaaccgccaccagcgttgcaaaaagcattcttttgcgccccgcacgatcgcaaccgctaccgcttcttgctgttgtaaatgcaaaccaatttgccagatcttaaatgccattgtgatgatctccttatcacccgtcactctgacgggtatatcaatgcgtctggcttgcctttatactaccgcgcgtttgtttataaactgcccaaatgaaactaaatgggaaatttccagtgaagttcgtaaagtattttttgatccttgcagtctgttgcattctgctgggagcaggctcgatttatggcctataccgctacatcgagccacaactgccggatgtggcgacattaaaagatgttcgcctgcaaattccgatgcagatttacagcgccgatggcgagctgattgctcaatacggtgagaaacgtcgtattccggttacgttggatcaaatcccaccggagatggtgaaagcctttatcgcgacagaagacagccgcttctacgagcatcacggcgttgacccggtggggatcttccgtgcagcaagcgtggcgctgttctccggtcacgcgtcacaaggggcaagtaccattacccagcagctggcgagaaacttcttcctcagtccagaacgcacgctgatgcgtaagattaaggaagtcttcctcgcgattcgcattgaacagctgctgacgaaagacgagatcctcgagctttatctgaacaagatttaccttggttaccgcgcctatggtgtcggtgctgcggcacaagtctatttcggaaaaacggtcgaccaactgacgctgaacgaaatggcggtgatagccgggctgccgaaagcgccttccaccttcaacccgctctactcgatggatcgtgccgtcgcgcggcgtaacgtcgtgctgtcgcggatgctggatgaagggtatatcacccaacaacagttcgatcagacacgcactgaggcgattaacgctaactatcacgcgccggagattgctttctctgcgccgtacctgagcgaaatggtgcgccaggagatgtataaccgttatggcgaaagtgcctatgaagacggttatcgcatttacaccaccatcacccgcaaagtgcagcaggccgcgcagcaggcggtacgtaataacgtgctggactacgacatgcgccacggctatcgcggcccggcaaatgtgctgtggaaagtgggcgagtcggcgtgggataacaacaagattaccgatacgctgaaggcgctgccaacctatggtccgctgctgcctgccgcagtcaccagcgccaatcctcagcaagcgacggcgatgctggcggacgggtcgaccgtcgcattgagtatggaaggcgttcgctgggcgcgtccttaccgttcggatactcagcaaggaccgacgccgcgtaaagtgaccgatgttctgcaaacgggtcagcaaatctgggttcgtcaggttggcgatgcatggtggctggcacaagtgccggaagtgaactcggcgctggtgtcgatcaatccgcaaaacggtgccgttatggcgctggtcggtggctttgatttcaatcagagcaagtttaaccgcgccacccaggcactgcgtcaggtgggttccaacatcaaaccgttcctctacaccgcggcgatggataaaggtctgacgctggcaagtatgttgaacgatgtgccaatttctcgctgggatgcaagtgccggttctgactggcagccgaagaactcaccaccgcagtatgctggtccaattcgcttacgtcaggggctgggtcagtcgaaaaacgtggtgatggtacgcgcaatgcgggcgatgggcgtcgactacgctgcagaatatctgcaacgcttcggcttcccggcacaaaacattgtccacaccgaatcgctggcgctgggttcagcgtccttcaccccaatgcaggtggcgcgcggctacgcggtcatggcgaacggcggcttcctggtggacccgtggtttatcagcaaaattgaaaacgatcagggcggcgtgattttcgaagcgaaaccgaaagtagcctgcccggaatgcgatattccggtgatttacggtgatacgcagaaatcgaacgtgctggaaaataacgatgttgaagatgtcgctatctcccgcgagcagcagaatgtttctgtaccaatgccgcagctggagcaggcaaatcaggcgttagtggcgaagactggcgcgcaggagtacgcaccgcacgtcatcaacactccgctggcattcctgattaagagtgctttgaacaccaatatctttggtgagccaggctggcagggtactggctggcgtgcaggtcgtgatttgcagcgtcgcgatatcggcgggaaaaccgggaccactaacagttcgaaagatgcgtggttctcgggttacggtccgggcgttgtgacctcggtctggattggctttgatgatcaccgtcgtaatctcggtcatacaacggcttccggagcgattaaagatcagatctcaggttacgaaggcggtgccaagagtgcccagcctgcatgggacgcttatatgaaagccgttcttgaaggtgtgccggagcagccgctgacgccgccaccgggtattgtgacggtgaatatcgatcgcagcaccgggcagttagctaatggtggcaacagccgcgaagagtatttcatcgaaggtacgcagccgacacaacaggcagtgcacgaggtgggaacgaccattatcgataatggcgaggcacaggaattgttctgattaaaaaggcgcttcggcgccttttcagtttgctgacaaagtgcacttgtttatgccggatacggcgtgaacgcgttatccggctaacaaaatcgtgaaaactcaataaattgcagaaaccccataagcctgataaacattgtgcatcaggcaaacttcacgcatttacactcgcccctgccctttcaaccattcgcgcacgaggaacagcgcactgacattgcgcgcttcattgaagtcagggtcttccagcaaatccatcatatgcgccagcggccagcgcacctatggtagcggctctggctcatcgccttccagtgattccgggtagagatcttgcgctaccacgatattcattttgctggaaaagtaagacggtgccatgctgagcttcttcaaaaaagtcagatcgttcgctccaaatccaacctcttcttttagctcgcggttagcggcttcgtagacgctttcacccggatcaattaatcctttcgaaaaacctaattcgtaggattcagttcccactgcgtattcgcggatcaggatcaggtgatcgtccacaatcggcacaatcatcactgcttcccggttggttggacgcattcgttcataaacacgccgcacgccattgctgaactccagatccacgctctcgacggtaaacagtcgggaacgggctacagtttcaacattcagaatggtgggtttttgtaatgatttgctcatcgtgggatctatgctgtgaaatcagcggttattgtgcgatatcggacacgctttcggcaatgtgaattgcatgttatttacatttatgtaacttaataaataatcgtcctcaaatcaaattaaaagtcaataggttgaaataactccaggaatttgctgatattccgccttcagagggtttgctatgatcagcggttactgtgatgtgcttaatgatgctcaagttaaactccacgcttgccgatagccaaccgcagaatcatgtattgtgtccggtgcgactgaccacgcctgacagactaagtaagatggggaaagcatgagcaccattgtgatttttttagctgctttgctggcctgctcactacttgcgggatggctgataaaagtgcgatccagacggcgtcagctgccctggaccaacgccttcgcggatgcgcaaacgcgtaaactcacacctgaagaacgtagcgccgttgaaaattatcttgagagcctgacgcaggtattacaggtgcctggcccaacgggagccagcgcggcaccgatctctctggcgctgaatgccgaaagcaacaacgtcatgatgctgacacacgctatcacgcgttacggcatctctaccgacgatccgaataaatggcgttactacctcgattcggtagaagtccacctgccccctttctgggaacagtacatcaacgatgagaataccgttgaactgattcataccgattcgctgccgctggttatttcactcaacggtcatacgctgcaggagtacatgcaggaaactcgcagctatgccttgcaacctgttccgtcaacgcaggcgtcgattcgcggggaagagagtgagcaaatcgagctactcaatattcgcaaagaaacgcatgaagaatatgcgctgagtcgtccgcgcgggctgcgtgaagcgttgctgatcgtcgcctccttcctgatgttctttttctgcctgattaccccggatgtatttgttccgtggctggcaggcggcgcgttactgctgctgggcgcaggtctgtgggggctattcgcgcccccggcaaaatcctccctgcgggaaattcattgtctgcgcggtacaccccgtcgttggggattgtttggcgaaaacgatcaggaacagatcaacaatatttcactcggtattatcgacctggtctatcccgcacactggcagccatacattgctcaggatctcggtcaacaaaccgatatcgatatctatctcgaccgccatgtagtgcgtcagggacgatatctttcgctgcatgatgaagtaaaaaactttccgttacagcactggctgcgcagtacgattatcgctgcgggctcgctgctggtgctgtttatgctgttattctggatcccgctggatatgccgctgaaattcactctctcatggatgaaaggcgcgcagaccattgaagccaccagcgtaaaacaactggctgacgctggcgtgcgggtaggcgatacattgcgtattagcggtacgggaatgtgtaatattcgaacttccggaacctggagcgcgaaaaccaattcaccttttttaccgtttgactgctcgcagatcatctggaacgacgcccgctcattgccattaccagaatctgaactggtcaacaaagcgacggcattgactgaagcagttaatcgccagctgcaccctaaaccggaagatgaatctcgcgtcagtgcctcattacgttcagcaattcaaaaatccggcatggtattgcttgatgattttggcgacattgtactgaagacagcggatttatgttctgccaaagatgactgtgtgcgactgaaaaatgcgctggtcaatctcggcaacagtaaagactgggacgcgctggtaaaacgcgccaacgccgggaagctcgatggcgtgaatgtgttattacgcccggtgagtgcggaatcgctggataacctggtggcaacctccaccgcgccgtttatcacgcatgaaacggcgcgagcggcacaatcactaaacagtccggcccccggcggattcctgattgtcagcgacgaaggcagcgattttgttgatcagccctggccttcggcatcactttacgactacccgccgcaagaacagtggaacgctttccagaaactggcacaaatgctgatgcatacgccgtttaacgccgagggtatcgtcacaaaaatcttcactgacgccaatggtacgcagcatattggccttcatccgatcccggatcgttccggcctgtggcgctatctcagcaccacattgctgctactgacgatgctgggtagcgccatttacaatggcgtacaggcctggcgtcgttaccagcgtcatcgcactcgcatgatggagattcaggcctattatgaaagctgcctgaacccgcaactgatcaccccttcagaaagccttatcgaataacacgtttgcgcggcaggttatgctaccctgtcgcgcaaattgcttcactctggagatttccctcatgcatatcaacattgcctggcaggacgtagataccgttctgctggatatggacggcacgttgctcgacctcgccttcgataactatttctggcaaaagctggtgcctgaaacatggggcgcgaaaaacggggttacgccacaggaagcgatggaatatatgcgccagcaatatcacgacgtacagcatacgctaaactggtactgtcttgattactggagtgagcaactgggtctggatatctgtgcgatgaccaccgagatgggaccgcgtgccgtactgcgtgaagataccattccgtttcttgaggcactgaaagccagcggtaagcagcgaattttgctcaccaatgcgcatccgcacaacctggcggtaaaacttgagcataccggtctggacgcacaccttgatttattactttccacccacacatttggttatccgaaagaggatcagcggttatggcatgcggtggccgaagctacgggtctgaaagctgaaagaacgctgtttattgatgacagcgaagcgattctcgatgctgccgcgcaatttggtattcgttactgcctcggcgtgactaatcctgattccgggattgccgagaaacagtatcaacgccatccgtcactgaatgactaccgccgcctgatcccctcgctaatgtgaaggagacgccatgaaagagaaacctgctgttgaggttcgactggataaatggctatgggctgcccgtttttataaaacccgcgcgctggcccgtgaaatgattgaaggcggtaaggtgcattacaacgggcagcgcagcaagccgagcaaaatcgtcgagctgaatgccacgctcactctgcgccagggaaatgacgaacgcacggtgattgtaaaggcgattactgaacagcgtcgccccgccagcgaggcagccttgctgtatgaagagactgcggaaagtgtagagaaacgcgaaaaaatggcgctggcacgtaaacttaatgccttaaccatgccgcacccggaccgacgcccggacaaaaaagagcgccgcgacctgttacgatttaaacacggcgacagtgaataactgtcacctgcaagagagatgattatgccgcaacatgaccaattacatcgctatctgtttgaaaactttgccgtgcgcggcgaactggtaaccgtttcggaaaccctgcaacagatccttgagaaccacgattatccgcagcccgttaaaaacgtgctggcagaactgctggttgcgaccagcctgttaaccgctacgctgaagtttgatggtgatatcaccgtacagctgcagggcgacggtccgatgaatctggcggttattaacggtaacaataaccagcagatgcgcggtgtggcgcgcgtgcagggcgaaattccagaaaatgccgacctgaaaacgctggtcggcaatggttacgtggtgatcaccattaccccgagcgaaggcgaacgctatcagggcgtagttggtctggaaggtgataccctggcggcctgcctggaagattactttatgcgttctgaacagctgccgacgcgcctgtttattcgcaccggcgacgtagacggcaaaccggctgcaggcggtatgttgttgcaggtaatgcctgcgcaaaatgcccagcaggacgactttgaccacctggcgacgctaaccgaaaccatcaaaaccgaagaactgctgaccttaccggcaaacgaagtgttgtggcgtttgtatcacgaagaagaggtgacggtttacgatccgcaggatgtggagttcaaatgcacctgctcgcgtgaacgttgcgccgatgcgctgaaaacgctgcctgatgaagaagttgatagcatcctggcggaagatggcgaaattgacatgcattgtgattactgcggtaaccactatctgttcaatgcgatggatattgctgaaatccgcaacaacgcgtctccggcagatccgcaagttcattaatgagtatgtccggcagagagggctctgccggattttacgactaatacacctgatgcgctttgtcactcattcagattcacattcagcctttcaccatccactacaagatcgcgccacgctttaggcttcgtccccagttttccatccttcgcagctgtgagtaatttttctttcgttatttcgttcggaagtaaactcatatcaagcgcgtcccattcttttctgtctgagtcaaagccatagacaatgactctgtcatcattaaaagcaaacaggatccgctccgcctgaccatcactattcagatcttgctcgaccaggacgcaggcgtctttttcaatacaggtcatcacgttatagcgatcctggattaaggccgaccagaatgtcgcatcaggtttaacagaaccaggggcaattaacacattatcggctaatactttttccgatacctgttgctgaagatgttgctctccatctaacgccatcagcagatcccgcgcgcgtttcgggtctttcataaacccggcatcgcttttcagcgactcaagcgcagcacgtccatagcgaccgctctgctcgagcatgtagatagttacctggtctgacgtgtttttgccgctctgataacgcgccatatggctgttcacgctaatgcgcatactgtccagcaccggcgaattaagaagcaccagtatcaccaacaccaataacgaaaccgcaaggttcactttgccctgaagaacaacgggattttgccctttacgccagacgatgctgacaaaataccccagcgaccacaccagtaacaccagcaccgccagcacgccctgcaagcggtcgacagtccagccgtactgagcgacccgcagccataacgcccaggcggcgacgaacacatacagcggagcaaccagcaaagcggttttaatcaggcaacgcaacggccctgtccagggaagtgacgctttttgcggatcgcggacaatagccattaagatcaattgcaaaaaggccagcgtcaacagcaacccggcggcggagatgtggcgagaaatcgcgctcaggcccgtaaacggcagggtgatgataaacatcagggttagcaatgatactaacggcagcaaccccgtggcgattaacgtgaacaacttttgaatagagtcgattaaacgtgactgtgttcgcgcgaggatcaccgccagcgcggtaaccagacctaacgtgagataaataaaccagtcggttgcaaaaaagagcgtattgaaaaacgtgatgccaacaagtttaaacaactcactccacagtaaaagcaccagccacgtcaagccattggcgagaaaaatcaccagtaatataagtacgttatgccatactgactggtaaaaatagcgatagcggctactgtcattgcggatgcgaaggctttgttgtatccacggtagcaacaacattgccatcaacagcagatagcaaccaaaatcccaaagcgccttttcagctctccaggggttcatgccatcagtttgccacttcagccagccgctcatccccagcgtggcaataaacactagcgccagccatccccaaaggcgcttctgtttaaaagagatcacggagaagagtaaaacggatgaaaacgcgacggtcgcaggcacgccataaacaatccaactgtgattttttccggaaagccaggcgatcagcaggtagcaaaccagaccctgaagtaatccggtagcaatcatcccccagcgtgttgcgggtgaaagttcaacgttatccatgttggttatccagaatcaaaaggtgggttaattatcgcatccgggcagtagtattttgcttttttcagaaaataatcaaaaaaagttagcgtggtgaatcgatactttaccggttgaatttgcatcaatttcattcaggaatgcgattccactcacaatattcccgccatataaaccaagatttaaccttttgagaacattttccacacctaaaatgctatttctgcgataatagcaaccgtttcgtgacaggaatcacggagttttttgtcaaatatgaatttctccagatacgtaaatctatgagccttgtcgcggttaacacccccaaaaagactttactattcaggcaatacatattggctaaggagcagtgaaatgcgcgttaacaatggtttgaccccgcaagaactcgaggcttatggtatcagtgacgtacatgatatcgtttacaacccaagctacgacctgctgtatcaggaagagctcgatccgagcctgacaggttatgagcgcggggtgttaactaatctgggtgccgttgccgtcgataccgggatcttcaccggtcgttcaccaaaagataagtatatcgtccgtgacgataccactcgcgatactttctggtgggcagacaaaggcaaaggtaagaacgacaacaaacctctctctccggaaacctggcagcatctgaaaggcctggtgaccaggcagctttccggcaaacgtctgttcgttgtcgacgctttctgtggtgcgaacccggatactcgtctttccgtccgtttcatcaccgaagtggcctggcaggcgcattttgtcaaaaacatgtttattcgcccgagcgatgaagaactggcaggtttcaaaccagactttatcgttatgaacggcgcgaagtgcactaacccgcagtggaaagaacagggtctcaactccgaaaacttcgtggcgtttaacctgaccgagcgcatgcagctgattggcggcacctggtacggcggcgaaatgaagaaagggatgttctcgatgatgaactacctgctgccgctgaaaggtatcgcttctatgcactgctccgccaacgttggtgagaaaggcgatgttgcggtgttcttcggcctttccggcaccggtaaaaccaccctttccaccgacccgaaacgtcgcctgattggcgatgacgaacacggctgggacgatgacggcgtgtttaacttcgaaggcggctgctacgcaaaaactatcaagctgtcgaaagaagcggaacctgaaatctacaacgctatccgtcgtgatgcgttgctggaaaacgtcaccgtgcgtgaagatggcactatcgactttgatgatggttcaaaaaccgagaacacccgcgtttcttatccgatctatcacatcgataacattgttaagccggtttccaaagcgggccacgcgactaaggttatcttcctgactgctgatgctttcggcgtgttgccgccggtttctcgcctgactgccgatcaaacccagtatcacttcctctctggcttcaccgccaaactggccggtactgagcgtggcatcaccgaaccgacgccaaccttctccgcttgcttcggcgcggcattcctgtcgctgcacccgactcagtacgcagaagtgctggtgaaacgtatgcaggcggcgggcgcgcaggcttatctggttaacactggctggaacggcactggcaaacgtatctcgattaaagatacccgcgccattatcgacgccatcctcaacggttcgctggataatgcagaaaccttcactctgccgatgtttaacctggcgatcccaaccgaactgccgggcgtagacacgaagattctcgatccgcgtaacacctacgcttctccggaacagtggcaggaaaaagccgaaaccctggcgaaactgtttatcgacaacttcgataaatacaccgacacccctgcgggtgccgcgctggtagcggctggtccgaaactgtaatgatttgaagctggagaatatctatccagtatcttatagaaagcaaaacgggaggcaccttcgcctcccgtttatttacccttcttttgtcgtgccctgcgcccgcgttaccggcactggcagccaggcgcgaatggaaagcccgccccgctcgctggtgccaagctccagcatcccgttatggttatccacgatacgctgcacaattgccagccctaatcccgtgccgctaatggtgcgcgcactgtcgccgcggacaaacggctggaacaggtgcttacgttgttccggcgcaattcccggaccgtcatcttccacctggaaccaggcgcgattcggctccgttccgctgctgactttgatccagccattgccataacgggcggcgttgaccaccatattcgccaccgcgcgtttgatcgacagcgggtgcattttcacttcaatgctgccggggtaaagcgcggtttcaatttcccgctcatagccactttcggcagcaatcacctcaccgagtactgcattaagatccgccatttccatcggcatctcctgcccggtgcgcaggtagtcgataaactgctcaatgatggcgttgcactcttcgatatctttattgatcgattctgccagatagccatcctgctcgctcatcatctcagtcgccaggcgaatacgcgtcagcggcgtgcgcaagtcgtgacttacccccgccatcagcagcgtgcggtcatccgccagttgcttaacaccagccgccatatggttaaaggcacgggtaacggaacgcacctccgaagcgccatactcacgcagcggcggcggaataatccctttaccaacctgcaaggctgcgtgttcgagatcgaccaacggtcggttctggatacgaataaacagccacgccccgcctatcgccaatagcataatcgccagcgtatagcggaacagcggagagaaatcgccctgatgaatttcggtcagcggcacgcgtacccagatattgggcgacagccaggttttcagccagacgacaggcgaacttttgttgacctcaacgcgcacttccgtcgggccgcccagttgctgcgccatctgatggcttaagaattcatagtgttgcgcccaacgcagacctgcctcttcggcagcctcgttggagtagagagagatccccagctcacggtagatctcccgacggaaagcgggaggcacaaccaactgcgtgccgtcctccagttgcagtttgtcggtcatcaacatacgcacttcgtacgcgaggactttattaaactgctggaggctcggcaaaatcgcgaagttcagcaccaccagataagtcgtcaccaggctggcgaacagcaaggtgacgatgagcaataacgtacgggcaaatgaacttcgtggcgagaagcgcaatcgcctcatgctttagagccgtccggtacaaagacgtagcccagaccccagacggtctgaatgtaacgcggatgcgctggatcttcttccaccatgcggcgcagacgcgaaatctgcacgtcgatggagcgttccattgcggaatattcacgaccacgggcaaggttcatcagcttatcgcgggagagcggctcacgcggatggctgaccagtgccttcagtaccgcaaactcaccgctggtgagcggcatcggctcgtcttcgcggaacatttcgcgcgtaccgaggttaagtttgaacttaccgaaagcaattaccgcctcttcctgtgacggtgcgcctggcagttcgttcgcctgacgacgcagcaccgcacggatacgggccagcagttcacgcgggttaaacggttttggaatgtagtcgtcagcgccaatctccaggcctacgatacggtccacttcttcccctttcgccgtcaccataatgatcggcatcgggttgctctgactacgaagacgtcggcaaatcgacaagccatcttcaccaggtaacattaaatccagtaccataagatggaaagattcacgagtcagcaggcgatccatctgttctgcattagcgacgcttcgaacctggaagccttgttcggtgagataacgttccagcagcacacgcaggcgcatgtcgtcatcgaccaccagaatcttgtagttctcttgcattgtttgtactcccaaaggttcgcaacaatttgtaagcgtgtattcttaaaaaagctcacgttcgtcaccagctaaatctggtatgaatttcagcctaaattgttacaaagcatattaaacagcagcttaagtatacaatttattcggcgaaacattattgattctgttgatatgatcacgttatacccaatgtgcgcattatcaaacagacaaagggaatcaacgagatgaaaacgcccctggttacccgggaagggtatgaaaaactcaaacaagagcttaattatctctggcgtgaagaacgcccggaggtcacaaaaaaggtgacctgggccgcaagtctgggcgaccgcagcgaaaatgctgactatcagtataataaaaagcgtctgcgtgaaatcgaccgtcgcgtgcgctatctcactaaatgcctggaaaatctcaaaatcgtcgattactcccctcagcaggaaggcaaagtcttttttggcgcgtgggtggagattgaaaacgacgatggcgtgactcaccgtttccgtattgtcggctacgatgaaatttttggccgtaaagattacatctctatcgattccccgatggcccgcgcattgctgaaaaaagaagtcggcgatctggcggtggtgaatacccctgccggggaagcgagctggtatgttaatgctatcgagtacgtgaaaccgtaaggaagagtcttaacctcctgccgatggctggcatttttgccagccagtccgtataactatcccctgatttttgatccgaaaagatgaactcaaaccatgatgaatgattcgttctgccgcattattgcgggtgaaattcaggcgcgcccggaacaggttgacgctgccgttcgcctgcttgacgaagggaataccgtgccgtttatcgcacgttatcgtaaggaaatcaccggcggtctggatgacacgcagctgcgtaatctggaaacgcgtctgagctatctgcgcgagctggaagagagacgtcaggcgatcctcaagtccatttccgagcaaggcaaactcaccgatgatctggcgaaggccatcaacgccaccctaagcaaaaccgaactcgaagacctctacctgccctacaaacctaaacgccgcacccgcgggcaaatcgccattgaagcagggcttgagccgttggctgacctgctgtggagcgatccgtcacacacgccagaagtcgccgctgcacaatatgttgatgccgataaaggcgtggcagataccaaagccgcgctggatggcgcgcgctatatcctgatggaacggtttgccgaagatgccgcgctgctggcgaaagtgcgtgattatctgtggaagaacgcgcatttggtttctacggtggtgagcggtaaagaagaggaaggggcgaaattccgcgactatttcgatcatcacgaaccgttgtccacggtgccttctcaccgcgcgctggcgatgttccgtgggcgtaacgaaggcgtacttcagctttcgctgaatgccgatccacagttcgatgagccgcccaaagagagctattgcgagcaaatcatcatggatcaccttggcctgcgcctgaacaatgccccggcggatagctggcgcaaaggcgtggtgagctggacgtggcgcatcaaggtgctgatgcatctggaaaccgaactgatgggcaccgtgcgcgaacgtgcggaagatgaagcaatcaacgtctttgcccgtaacctgcacgatctgctgatggcggcccctgccggactgcgtgcaacgatgggcctcgatccgggtctgcgtactggggtaaaagtggcggtggtcgatgccactggcaaactggtggcgaccgacaccatttacccgcacaccggacaggccgcaaaagcagcgatgaccgttgctgcgctgtgtgaaaaacataacgttgaactggtagcgatcggtaacggtacagcttcccgcgaaactgagcgtttctatctcgatgtgcagaagcagttcccgaaagtgaccgcgcagaaagtaatcgtcagcgaagcaggcgcgtcggtttactcggcttccgagctggctgcacaggagttcccggatctcgacgtttcgctgcgtggcgcggtgtctatcgcccgccgtttgcaggatccgctggcggagctggtgaaaatcgatccgaaatctatcggcgtaggtcagtatcagcatgacgtcagccagacgcaactggcccgcaaactggacgcagtagtagaagactgcgtaaacgccgttggcgtcgatctcaacactgcttctgttccgctgttaacccgcgtggcgggcctgacgcgcatgatggcgcaaaacatcgttgcctggcgcgatgagaacggtcagttccagaaccgtcagcaactgttaaaagtgagccgtctggggccgaaagccttcgagcagtgcgcgggcttcttgcgcattaaccacggtgataacccgctggacgcgtctaccgttcacccggaagcctatccggtggtggaacgcattctggcagcaacacagcaggcactgaaagatctgatgggtaacagcagcgaactgcgtaacctgaaagcgtctgactttactgatgagaaattcggtgtgccgacggtaaccgacatcatcaaagagctggaaaaaccgggtcgcgatccgcgtccggaatttaaaaccgctcagtttgccgatggcgtcgagacaatgaacgacctgcaaccgggtatgatcctcgaaggcgcagtgaccaacgtcaccaactttggcgcgtttgtcgatattggcgtgcatcaggacggcctggttcacatctcttcattgtcgaacaagtttgtggaagatccgcataccgtggtgaaagcgggcgacattgtgaaggtgaaagtgctggaagtggatcttcagcgtaaacgtatcgccctgactatgcgcctggatgagcagcctggcgaaaccaacgctcgtcgcggcggcggtaatgaacgcccgcaaaacaaccgcccggcagccaaaccacgcggtcgtgaagcgcagcctgccggtaatagcgcgatgatggatgcgctggcggcggcaatgggcaaaaaacgttaaacgcccgtactggcctacggttcgaatttgcacgaaatcgtagggcagataaggcgttcacgccgcatctggcaacgaacgccttgcctgacataaaagtgccggagaatatctccggcatttttattccacagccaaactcataatatattccggcaatatttatcatttcattaacaactgaaaccttaattaaacattagccagtccgggtaattcactattcgaattatattttcgctgcgatataaccttgagccacatcaacattgagtcagattattattcaaaccaacattcgcacacattttaagtattgctgatagaaaccattctcattatcattgtgttgttgattatttaatctctcctttgttggcaaatcatctggtctcatgtcgctgtcaaacgccccatgaggtagttatccagttaatgagaaacaagtaggcacctatgcaatacactccagatactgcgtggaaaatcactggcttttcccgtgaaatcagcccggcatatcgccaaaaactgctttctcttggcatgttacctggctcctcttttaatgtggtgcgcgtcgctccactcggcgaccccattcatatcgaaacccgtcgtgtgagcctggtattacgcaaaaaagatctggccttattagaagtggaagcggtttcctgttaatacggtgataacaacaatgaaaaaattaaccattggcttaattggtaatccaaattctggcaagacaacgttatttaaccagctcactggctcacgtcagcgtgtaggtaactgggctggcgttaccgtcgaacgtaaagaagggcaattctccaccaccgatcatcaggtcacgctggtggacctgcccggcacctattctctgaccaccatctcatcgcagacctcgctcgatgagcaaatcgcctgtcactacattttgagtggcgacgccgacctgctgattaacgtggtggatgcgtctaaccttgagcgtaacctgtacctgacgctacaactgctggaactcggcattccctgcattgtggcactgaacatgctcgacattgccgagaagcaaaatattcgtattgaaattgatgctctgtcggcgcgtctgggctgtccggtgatcccgctggtttcaacccgtggtcgcggtattgaagcgctcaagctggcgattgatcgctataaagctaacgagaatgtggaactggtgcattacgcacagccgctgctcaacgaagcagattcactggcaaaagtgatgccttccgacatcccgctgaaacaacgtcgctggctgggcctgcaaatgctggaaggcgatatctacagccgcgcctacgccggtgaagcgtcgcagcatctggatgccgccctcgcccgtctgcgtaatgagatggacgatccggcgctgcacattgccgatgcgcgttaccagtgcattgctgccatctgtgatgtggtaagcaacaccctgacggcagaacccagccgtttcaccactgcggtagataaaatcgtgctcaaccgtttcctcggtctgccgattttcctctttgtgatgtacctgatgttcctgctggctatcaacatcggcggggcgttacagccgctgtttgacgtcggctccgtggcgctatttgtgcatggtattcaatggattggctacacgctccacttcccggactggctgactatcttcctcgcccagggcctgggtggcggcattaacaccgtgctgccactggtgccgcagattggcatgatgtacctgttcctctccttccttgaggactccgggtatatggcgcgtgcggcgtttgtgatggaccgtctgatgcaggcgctgggcttgccggggaaatcctttgtgccgctgatcgtcggtttcggttgtaacgtaccgtcggtaatgggtgcacgtacgcttgatgcaccgcgtgaacgtctgatgaccatcatgatggcaccgtttatgtcctgcggcgcgcgtctggctatcttcgcagtattcgcggctgccttcttcgggcagaacggtgcgctggcggtcttctcgctgtatatgctgggtattgtgatggcggtgctgactggcctgatgctcaagtacaccatcatgcgcggtgaagcgacgccgtttgtcatggagttgccggtctatcatgtaccacacgttaaaagcctgattatccagacctggcagcgtctgaaaggcttcgttctgcgtgctggtaaagtgatcatcatcgtcagcattttcctgagcgctttcaacagcttctcgctgagcgggaaaatcgtcgataacatcaacgactcggcgctggcgtccgtcagccgggtgatcaccccggtcttcaagccaattggcgtgcatgaagataactggcaggcaacggttggcctgtttacaggtgccatggcgaaagaagtggtagtgggtacgctcaacaccctctacaccgcagaaaatattcaggacgaagagttcaatccggcagaatttaacctcggtgaagagctgttcagtgcgatagatgaaacctggcagagcctgaaagacaccttcagccttagcgtactgatgaaccccattgaagccagcaaaggcgacggcgaaatgggtaccggggcgatgggcgtgatggatcagaaattcggtagcgcagcagcagcttacagctacctgattttcgtcctgctgtatgtaccatgtatctcggtgatgggggctatcgcccgtgaatcaagccgtggctggatgggcttctccatcctgtgggggctgaatatcgcttactcactggcaacattgttctatcaggtcgccagctacagtcagcatccaacttacagcctggtgtgcattctggcggttatcctgtttaacatcgtggttatcggtctgctgcgccgcgcgcgtagccgggtggatatcgaactgctggcaacccgcaagtcggtaagcagttgctgcgcagccagcaccaccggtgattgccattaatggcttcacttattcaggtgcgcgatttgctggcgttacggggccgtatggaagcggcccagataagccagacattgaacactccacagccaatgattaacgccatgctgcaacaactggaaagtatgggcaaagccgtgcggatccaggaagaacctgacggctgcctctctggcagttgtaaaagctgcccggaaggaaaagcctgtctgcgcgagtggtgggcgctgcgttaaccttactccatcgcctgttttggaaagcccggtatgcgtctgcatccgggcttttttgcgtgcggctttccataaaaatgcaactcttgcagcacggcgtaagttcctttgaaagcatctcgcagggatgaaaactcgctaatacacaggtgtggagtggcgcgtagagtcgcggcattcaaacaacaggtgaaggaacgccatgagcaaaaagcagagttccaccccacacgatgcgctgttcaaactctttttacgccaaccggacacggctcgtgattttcttgcgtttcatttaccggcacccattcacgcgctttgtgatatgaaaaccctcaagctggagtcgagcagctttattgatgacgatctgcgtgaaagctattccgatgtgctgtggtcggtgaaaacggaacaaggaccaggatacatctattgtctgattgaacatcaaagcacctcaaacaaactgatcgcatttcgcatgatgcgttacgctattgccgcaatgcaaaatcaccttgatgctggatacaaaacgttgccgatggtggtgccattgttgttttaccacggtattgaaagcccctatccctattcgctgtgttggctggattgtttcgccgatcccaaactggcaaggcagctttatgcctccgcatttccgctgattgatgtcaccgtcatgcctgatgatgaaatcatgcagcaccgacgtatggcgctgctggagttaattcaaaaacatattcgtcaacgcgacctgatggggctggtagagcaaatggcctgcttattaagtagtggatacgctaatgacagacaaatcaaagggctgtttaattacatactgcaaactggcgacgctgtacgttttaacgattttatcgacggcgttgccgaacgttcaccgaaacacaaggagagtttaatgactattgcggaaagattgcggcaggagggggaacaatccaaagccctgcatatagccaaaataatgcttgaatccggagttcctcttgcagacatcatgcgctttaccgggctgtcagaagaagagttggctgcggcgagtcagtaaagttctgtctcgccatttcaaaagccacctacaccctctgcttcaacgccaccagcaggtgacaaaactcggccggatgcgaaataaatggcgcatgggccgctttggcgaagatatatgattcgctgtgaggccaaagtttatccagcatcggcaccactttgcgcggcaccagaccgtcgagatagccatacaatcgcaaaaacggcatggacacgttttgcagcggctgacggagatcgaccgttttcaggatttccagcccgccattaagcacgtcaacctccggcatcggtaacgccagaacggttttcttcaacgcccgcgcatcctggcgcgccgtttcagtccccatggtttgtaacgccaggaaccgctccactgtacgctgaaaatcatcactgagttgctgctgaaatcccgccagcacgtccggttttatccccggccactcgtcacgagcactaaaacaaggtgacgacgccacggtgaccagcgcctgaacacgctcgggatgggttaacgcaatctggcttgccaccagcccgcccagactccagcctaaccaaatggctttatcaggtgcctgttgcagcacggcttcggccatatcagcaagtgacagcgcaccaaatccccggctacgcccgaagccgggcaggtcaacaaggtgcagcgtaaaatgcgagctaagttcctcgtcaatgcaacgccacacttcggcattcagtccccatccgtgcagcagcacaagatgaacattcccctgacctttggtctgccaccagatgttattcatccgctattgttctcttttgacttacaaggatgaacatatgctaacagtaccgggattatgctggctatgccgaatgccactggcgttaggtcattgggggatttgttcggtctgttcacgcgccacccgcacagataaaacgttatgcccacaatgtggattacccgccacacactcccatcttccctgcggtcgctgcctgcaaaaaccgccgccctggcaaagactggtcacggttgccgactatgcgccgccgttaagtccgcttatccaccagcttaaattttcccggcgcagtgaaatcgccagcgccctgtcacgtctgttactattggaagtcttacacgctcgtcgcaccaccgggttgcaattgccggatcgcatcgtcagcgttccgttatggcagcggcgtcactggcgtcggggatttaatcagagcgatttgctgtgtcagccgttatcacgctggttgcactgccaatgggatagcgaagccgtcacacgtacacgggccactgcgacccagcattttctcagtgcccggctgcgcaagcgcaacctgaaaaatgcctttcgtcttgaattgcccgtgcaaggtcgccatatggtgattgtggatgatgtcgttaccaccggaagtaccgtcgcagagattgcgcagttgcttttacgcaatggtgcggcggctgtccaggtctggtgcctttgtcgaaccttgtagagcctcgatgatgggcgtattataaccaactaaaatagtcaactattaggccattactatgatccgtatttccgatgctgcacaagcgcactttgccaaactgctggcaaatcaggaagaagggacacaaatccgcgtatttgtgattaaccctggcacgcctaacgctgaatgtggcgtttcttattgtccgccggacgctgtggaagccaccgacacagccctgaaatttgacctgctgaccgcgtatgttgatgagttaagcgcaccatacctggaagatgcagagatcgattttgttaccgaccagttgggttcccagttaacgctgaaagccccgaacgccaaaatgcgtaaagtggcagacgatgcaccgctgatggagcgcgtggagtatatgctgcagtcgcagatcaacccacagcttgctggtcacggtggtcgcgtttcgctgatggaaatcaccgaagacggttacgccattctgcaatttggcggcggctgtaacggttgttccatggtcgatgtgacgctgaaagaagggatcgagaagcagctgctgaacgaattcccggagctgaaaggtgtgcgcgatctcaccgaacaccagcgcggcgaacactcctactactaagttatcccctcttttgtagattgcccgatgcgacgctaaagcgtcatttcgggcctacgttgaacatgtgccagacgttggcgcagcattgctttgtcaaatcctcggttcgtttccccgcgataatatgaccaacctctcataatttaaatttaccccgctctggtgattctcaaacgccagatgttacccgtatcattcacatgggtaccaaacatactcctgacatctgactacaataattagttttagtgggtatcagtcgtggtgccgcaatatctctgttcccgattgggataattagagtttgtcgtcagaaaattgacgttacccataacaaatgaaaggccaggtaaatcatgccattagtcattgttgctatcggtgtaatcttgttgttgctcctgatgatccgcttcaaaatgaacggcttcatcgctctcgtcctcgtggcgcttgctgttggattaatgcaaggaatgccgctggataaagttattggctccatcaaagccggtgtcggcgggacgctcggtagccttgccctgatcatgggttttggcgcaatgctgggcaaaatgctggcagactgcggtggcgcacaacgtatcgccaccacgctgattgccaaatttggtaaaaaacacatccagtgggcggtggtactgaccggttttaccgttggttttgccctgttctatgaagtgggctttgtgctgatgctgccgctggtgtttaccatcgcggcttctgcgaatattccactgctgtatgttggtgtaccaatggcggctgcactgtctgtgacccacggcttcctgccaccgcatccgggtccgactgcgattgccaccattttcaatgccgatatgggtaaaaccctgctgtacggtactattctggcaatcccgaccgtgattctcgccggtccggtttacgctcgcgtgttgaaaggtatcgataagccaattccggaaggtctctacagcgcgaaaaccttcagcgaagaagagatgccgagctttggcgtcagcgtctggacctctctggtgccggtagtactgatggcgatgcgtgcgattgccgaaatgatcctgccgaaaggtcacgctttcctgccggtagcggagttcctcggtgacccggtaatggcaacgctgattgccgtgctgattgcgatgttcacctttggtctaaaccgtggtcgttcaatggatcagattaacgacacgctggtttcttccatcaaaatcattgcgatgatgctgttgatcatcggtggtggcggtgcgttcaagcaggtgctggtagacagcggcgtggacaaatacattgcttccatgatgcacgaaaccaacatttctccgctgctgatggcctggtcgattgctgccgtactgcgtatcgcgctgggttccgcaaccgttgcggcaatcactgcgggtggtatcgcggcaccgctgattgcaacgacgggtgttagcccggagctgatggttattgcggttggttccggtagtgtgattttctctcatgtgaacgatccgggcttctggctgttcaaagagtactttaacctgactatcggcgagaccatcaaatcctggtcgatgctggaaaccattatctcggtgtgcggtctggtaggctgtctgctgctgaatatggtgatttgataacactgactgccggatgcggcgtgaccgccttatccggcctacgattcgggatgaattagtaggccggataagacgcgtcaagcatcgcatccggcatcaaccgcactctacttcttcttcgctgcagctctgcgccgtctgtccaaatccttcagcaacttgttcacgccatcatcggcaaacatcgactcaagcgttgcggaaagcttgcgtcgccagtttttatactggtaactggtgccaggaatattcaccggttcggccatatccagccagtcttccggctgtagtcctaacagagcactgttactgtcggcaatgtagcgctgcaaaccacggttcagcgtcggcgtcatcgacatcaacgatgccttatgcccggcacgtttcggcagacaaccatatttatgcagtgcatccagcagcccttgcttcgccagttcgcgatcctgatacagaccgcgcagtaccacttcatccggatacagccccagggttttgcccagcgttagatccccgctctcccagtaaccgcgcagcgttggcaggtcatgtgtcgccgcaaccgccatcgactgctccggatacgctttcggtgcacggaacgtcttctcgtggtcgttttcgaaatagagcactttgtaagagtacacaccgctgctgcgcagcttaccgacaatctctaccggtacggtaccgagatcttcaccaatcaccatacagcgatgacgtttactttcgagtgccagaatcgagagcagatcatccaccggatagtgaacatacgcgccctgatctgccgtctcgccatacggtatccaccacaaacgcagcatcgacatcacatggtcaattcgtaatgcgccgcagttttgcatattggcacgcaacagctcgataaacggttcataggcacgcgcggtgatgatatgcgggtccattggcggtaatccccagttctgccccaacgggccgaggatatccggcggcgcgccaaccgatgctttcaggcaatatagttcacggtcacaccaggtttccgccccaccttccgctacgccaaccgccagatcacgatacaagccaatcggcatttcatagccctggcttatctcccagcaggcggcaaactggctgtaagccagccactgcaaccagagataaaaatcgacgtcatcacgatgttcttcgcagaactgacgcacttctggtgaatccacgttctgatacatctctggccatgcaggccagccccagcgcatttcgtcctctttcacttgctgggcatgtagcgcatcaaaggctgcctgccagaacaggctgtcgccctgctctgcaacaaactggcgaaacgcggccatctgctcatcatcacgttgcgcgaaacctttccacgccattcgtaatgctgtcatttttagggcggtaaccgtggagtaatcgacccagtcggcatcgcgcgcctgttgcagcgtctgttgcgtggtcggcaactgccaccaggcctgagcctcttcgctaagatggaaatcttcaacggcgttaacgtcgatataaatcacattcagccaacggcgagaagacgggctgtatgggctggcgctctccggatttgccggatagagcgcatgaatcgggttcaggccaatgaacgacccgccacgttttgccacatccaccagcatcgctttgagatcgccaaaatccccaataccccagtttttttccgatcgcagcgtataaagctgaacgcaggcaccccacagcttttgtttattcagcaacgcctgcggttcgtaacagcgtttcggggcgacaatcacccggcaatgcgcgcgctggtcgtcctgggtgagtgtcagcgtgtgataaccttccggcagcttcgtcggtagattgaacgctttgccccccgttacatggcctttgtactgcgttccttcttcggtggtcagcagccagctatattcgccgctgccctccaccaccatcggcatttttttgccgcgggtataaaccatgacattcgggactggcgttaccgccactttcgtggcggtacgttgatgcatcgcgtcaagcaaacgccgtttggtttcggcgctaatcgactgcggtttaccgtgggcattgatgtaattggggctaatccccgccgccagcgcggcattatccagacgtttgctttccatcgagcttccttagcgttttgcctgccagatacgagcctgataatcgcgaatagagcgatccgagctaaacataccgcagcgggcggtattgaggatcgccgcgcgagtccaggcctcctggtcgcggtacagcacatccacctgcttttgtgcctctacataggctgcgaaatccgccatcaccagatacggatcgccgccctgtttgccgatactgtgcagcatctggtcgaaggcatgcttatcgccgtcgctgtatttaccgctttccagctctttcaatactgcgtccagcaccttatctttcttccgccatttcaccgggtcgtagcctttggccagaattgccttcacttgttccacggtatgaccaaaaataaagatattttcttcaccgactttctcggcgatttcaacgttcgccccatccagcgtaccgacagtaagcgcaccattgagcgccagtttcatattgccggtaccggaagcttctttacctgcagtcgaaatttgttcggagatatccgccgccgggatcagtttttccgccgccgaaacgcaataatccggcaggaacaccaccttcaacttatcgccaaccagcggatcgttgttgatcacgtcagccactttgttgatcgcaaagataatattcttcgccaggtagtagcccggtgccgctttcgcgccgaagaggaagacgcgcggtacgcgatcagcctgcgggttttcacgaatttctttgtacaacgccagaatatgcagcagattcaggtgctggcgtttgtactcatgcaaacgtttgatctgaatatcgaaaatcgcctgtggattgatctcaataccggtacgaactttcacaaactccgccagacggactttattcgcctgcttgatctcgcgatattgctgacggaatttcgcatcatcagcgaatttttccagattgatcagctgatcgagatcgttagcccactctttttgcagtgatttatccaacagagccgccagtgccgggttgcactgtttgatccagcgacgtggggtaataccgttggtgacgttatggaatttgttcggccatagctggtgatattccgggaacagatctttcaccaccagatccgagtgcagcgccgcaacaccgttcaccgcgaaaccgccaaccacacacaggttcgccatatgcacttgtttgtcgtgcaccaccgccagtttggcccacactttttcatcgcccggccaggttttctctaccagcgttttaaagcgagtattaatttcgttaataatctgcatgtggcgcggcagtaagcctttcaccagtttcacatcccagcgttccagcgcttctggcatcagggtatggttggtgtaagcgaaagttttgctggtaatggcccaggcgtcatcccagctcatctggtgctcatcgatcagcacgcgcagcagttctggaatcgcgatagttgggtgggtatcgttcagctgaataacttcgtaatccgccagttcgtgcagtttacgccccgccagatgatggcgacgcaaaatatccgctaccgaacaggcacactggaagtattgctgcatcaggcgcagctttttaccggcagtatggttgtcgtttggatagagaactttggtcagtttttccgcattgatgccctgctgttcggcacgcaagaaatcaccgtcgttaaatttagtcagatcaaacggatgcgcgtgcgtcgcctgccacagacgcagcggctgcgccacgccattacgatagccgacaacggggagatcccacgcttgaccggtaatggtaaactccggctcccagcgtccgtctttcgtcactttaccgccaatccctacctgcacatccagtgcttcgttgtggcggaaccacgggtagttactgcgatgccagtcatccggcgcttcaacctgtttgccatcgacaaaagactggcggaacaaaccatattgatagttcagaccgtaacccgtcgcagactgaccgacagttgccattgagtcgaggaagcacgccgccagacgtcccagaccaccgttacccagcgccgggtcgatctcttcttccagcaggtccgtcagattgatgtcataagccttcaacgaatcctgtacatcctgataccagccgagattcaacaggttgttgcccgtcaggcgaccaatcaaaaactccattgagatgtagttaacatgtcgctgattcgccaccggcttggcgaatggctgagcacgcagcatttcggccagtgcttcactcactgctagccaccactggcgaggagtcatttcagccgcagaatttaagccataacgctgccactgacgtgaaagcgcttcctgaaattgcttatcgttaaaaataggttgtgacataggagttccacttttcttagattttcaacacaacgttatcgctagtttgccaggctcgatgttgaccttcctcatcctgcgggggattaggcagggaggagttgcggggatgagcaaggaaatgtgatctcaaccacttaaagctagtgcaaaccacaggattagcatcaaatcaatgcaatacagcgcagaaaatctgtatctaagtgcaaaaaatggccgttgcgtattttcaaaaagcggaaggtaactctataaattaagtaaaggagtgaaacagtttcataagtaaaatatccagtgtgctccatctcattcttaatagatttattaagatcatctttttagatggcactttcatcaggaatgaagaagaaacccttgcttaaatgaatctgatgaacataagggaaaccagtattcacgctggatcagcgtcgttttaggtgagttgttaataaagatttggaattgtgacacagtgcaaattcagacacataaaaaaacgtcatcgcttgcattagaaaggtttctggccgaccttataaccattaattacgaagcgcaaaaaaaataatatttcctcattttccacagtgaagtgattaactatgctgattccgtcaaaactaagtcgtccggttcgactcgaccataccgtggttcgtgagcgcctgctggctaaactttccggcgcgaacaacttccggctggcgctgatcacgagtcctgcgggctacggaaagaccaccctcatttcccagtgggcggcaggcaaaaacgatatcggctggtactcgctggatgaaggtgataaccagcaagagcgtttcgccagctatctcattgccgccgtgcagcaggcaaccaacggtcactgtgcgatatgtgagacgatggcgcaaaaacggcaatatgccagcctgacgtcactcttcgcccagcttttcattgagctggcggaatggcatagcccactttatctggtcatcgatgactatcatctgatcactaatccagtgatccacgagtcaatgcgcttctttattcgccatcaaccagaaaatctcaccctggtggtgttgtcacgcaaccttccgcaactgggcattgccaatctgcgtgttcgtgatcaactgctggaaattggcagtcagcaactggcatttacccatcaggaagcgaagcagttttttgattgccgtctgtcatcgccgattgaagccgcagaaagcagtcggatttgcgatgacgtttccggttgggcgacggcactacagctaatcgccctctccgcccggcagaatacccactcagcccataagtcggcacgccgcctggcgggaatcaatgccagccatctttcggattatctggtcgatgaggttttggataacgtcgatctcgcaacgcgccattttctgttgaaaagcgccattttgcgctcaatgaacgatgccctcatcacccgtgtgaccggcgaagaaaacgggcaaatgcgcctcgaagagattgagcgtcaggggctgtttttacagcggatggatgataccggcgagtggttctgctatcacccgctgtttggtaacttcctgcgccagcgctgccagtgggaactggcggcggagctgccggaaatccaccgtgccgccgcagaaagctggatggcccagggatttcccagcgaagcgattcatcatgcgctggcggcaggcgatgcgctgatgctgcgcgatattctgcttaatcacgcctggagtctgttcaaccatagcgaactgtcgctgctggaagagtcgcttaaggccctgccgtgggacagcttgctggaaaatccgcagttggtgttattgcaggcgtggctgatgcaaagccaacatcgctacggcgaagttaacaccctgctagcccgtgctgaacatgaaatcaaggacatcagagaagacaccatgcacgcagaatttaacgctctgcgcgcccaggtggcgattaacgatggtaatccggatgaagcggaacggctggcaaaactggcactggaagagctgccgccgggctggttctatagccgcattgtggcaacctcggtgctgggtgaagtgctgcactgcaaaggcgaattgacccgctcactggcgctaatgcagcaaaccgaacagatggcacgccagcacgatgtctggcactacgctttgtggagtttaatccagcaaagtgaaattctgtttgcccaagggttcctgcaaaccgcgtgggaaacgcaggaaaaagcattccagctgatcaacgagcagcatctggaacagctgccaatgcatgagtttctggtgcgcattcgtgcgcagctgttatgggcctgggcgcggctggatgaagccgaagcgtcggcgcgtagcgggattgaagtcttgtcgtcttatcagccacagcaacagcttcagtgcctggcaatgttgattcaatgctcgctggcccgtggtgatttagataacgcccgtagccagctgaaccgtctggaaaacctgctggggaatggcaaatatcacagcgactggatctctaacgccaacaaagtccgggtgatttactggcaaatgaccggcgataaagccgccgctgccaactggttgcgtcatacggctaaaccagagtttgcgaacaaccacttcctgcaaggtcaatggcgcaacattgcccgtgcacaaatcttgctgggcgagtttgaaccggcagaaattgttctcgaagaactcaatgaaaatgcccggagtctgcggttgatgagcgatctcaaccgtaacctgttgctgcttaatcaactgtactggcaggccggacgtaaaagtgacgcccagcgcgtgttgctggacgcattaaaactggcgaatcgcaccggatttatcagccattttgtcatcgaaggcgaagcgatggcgcaacaactgcgtcagctgattcagcttaatacgctgccggaactggaacagcatcgcgcgcagcgtattctgcgagaaatcaatcaacatcatcggcataaattcgcccatttcgatgagaatttcgttgaacgtctgctaaatcatcctgaagtacctgaactgatccgcaccagcccgctgacgcaacgtgaatggcaggtactggggctgatctactctggttacagcaatgagcaaattgccggagaactggaagtcgcggcaaccaccatcaaaacgcatatccgcaatctgtatcagaaactcggcgtggcccatcgccaggatgcggtacaacacgcccagcaattgctgaagatgatggggtacggcgtgtaagtttagccggataacgcgccagatccggcttacatctctgcatcattcaatgctcacccgcgttacgccatctgtttctatcaaactaaaccgcaccggcaagaaacgctccaccaccgcgatattggtcagcagatggcatgagggatgggcgaccgtaaattcccccgcgcccgccagcgccatcggtagcaccagttggtcagcaagatattcccccaccgccgccgtgcttgccaggtagcgtttcacctctttcaccaactgtgccgcaaccacctcggcactgacgcgcttttcaccgacgacaaaaaagcgttcggtgatattttcactttcgacttcaagcgagacggtattacccggcccctggtcgcgcggcaggttatgaatattctgttcatgcagggaaaaactccccgccagtgtagcgatttcacgctcagcaacatggcgcggcacaccagctaatagaacttctccacgcatctgcacaatgttcccgcgctcgccaagttgcaaggtgttaaacgatgccacgggcgagacttccgttgccaccacaccgcctccggcagggtaaaaaccgtggcgtaacagcgtggtttgctgatgaattcctattttcgccagcagcggctccagcacccggcggataaaatccgcaggcggcgccgacgggttatcggtgccgccgctcacttcaacacgcgaaggtccatcggcaaaccacagcgcgggcagcaccgtttgcagcaccagcgtacaacttccggcgctaccgatagcaaagcggtaatcgccgccgcgcacggtgccgggccggaagagcagacgctgcgaccccagctccgcgccttccacggttgctccgcaaatttccgtcgccgcctttaccgcggtcagatgctggcgcaacagccccggtttcgcccgcccggcacgaatgctggtgatggtaaatggctggccggttatcatcgacaggctcagcgccgagcgcaggatctgcccgccaccttcgccctgtgcgccatccagcgcaatcatccttttcatcatttatccttttacgcacaccacctgacgcagggtatagataacttccaccagatcgctttgtgccgccatcaccgcatcaatatctttatacgccatcgggatttcgtcgatcacttcggcatctttacggcattccacatgcgcggtggcacgaatttgatcttccacgctgaacagttttttcgctttagttcggctcattacccgcccggcaccgtggctgcacgaacagaacgactcttcatttcccagcccacggacgataaagctttttgctcccatcgaaccgggaataattccatattgaccagcacgcgcagacaccgcgcctttacgcgtcacgtagatctcttcaccaaagtgctgttctttttgcacatagttgtggtgacagttgatctcttccatcgccagcgtttgtggctgtctgaccgttttctgcgtaatgctctgcaatgccgttaccacgttttccatcatcgcatcgcggttaaggctggcaaaaagctgcgcccaggccacggctttcaggtaatcatcaaagtattccgtaccttccataaagtacgccagatcacgcgacggcaacgtctcaagcgtttcctgcatctctttttgtgccagatcgataaagtaagtcccgatggcgttaccaattccgcgtgaaccggagtgcagcataatccacacctggtccgactcatcaaggcagatttcaataaagtggttaccggttcccagcgttcccaggtgtttatagttattggtattcaggaaacggggatatttttgcgttaaccactgataaccggcttcaagctcagcccatttagcatcgacgttaacaggtggattttcccaggcacctttatcacgtttacaacggccagtggtacgcccgtgcggcacggccgtttcaatcgcctgacgcagctctgccaggttttcaggcaggtcttccaccgttaacgcggtacgcagcgcgttcattccacagccaatatccacgcccaccgccgccggaataatcgcccctttggtcgggatcacgctaccaatggtggaacctttacccaggtgtacatcaggcattaccgcaatatgtttgaaaataaacggcatcttcgccgtattaataagttgctgacgcgcatcggcctctaccggcacgcctttggtccacatttttaccggggcattttcagtggtcagtaattcgtaattcattttgtttttctcttttcgttgtttgctgtcctgataattgcaaccgtcgtgccagaaaattaaataagcagcttaattttttaattcattgttttaaaaaagattatatctttacgtccgtaaccggagatttcccgcaaagccaatttaccgataatgaaatatcgtcttttataaggatatctaagatgcgtaaaacagtggcttttggctttgtcggtaccgtactggattatgccgggcgcggcagtcagcgctggtcaaaatggcgtccgacactctgtttatgccagcaagaatcgttggtcatcgatcgactggaattgttgcacgacgcccgctcgcgctcgctatttgaaacgcttaaacgcgatatcgccagcgtttcgccagaaacagaagtggtgagcgttgagattgaactgcataacccgtgggatttcgaagaggtctacgcctgcctgcatgatttcgcccgtggttacgagtttcagccagaaaaagaagactatttaattcacatcaccaccggtacccacgtcgcgcagatttgctggtttctgctggcagaagcgcgttacctgcccgcccggctgatacaatcttcacctccgcgcaaaaaagaacagccgcgcggcccaggtgaagtaacgattatcgatctcgatttaagccgttataacgccatcgccagccgctttgccgaggaacgccagcaaacgcttgattttcttaagtccggcattgccacgcgtaacccccacttcaaccgcatgattgagcagatcgaaaaagtggcgatcaaatcccgcgcgccgattctgcttaacggtccaaccggcgcgggcaagtcatttctggcgcgacgcatcttcgagttaaaacaggcgcggcatcagtttagcggcgcgtttgtggaagtgaactgcgccaccctgcgcggcgataccgccatgtcgacgctgtttggtcatgtaaaaggcgcgtttaccggggcgcgggaatctcgtgaaggtttattacgcagcgccaacggcggaatgttgtttcttgatgagattggcgaactgggcgcagacgaacaggcaatgctgctgaaagccattgaagagaaaaccttttacccgtttggcagcgatcgccaggtgagcagtgattttcagcttatcgccggaacggtgcgcgatttgcgccagctggttgccgaaggcaaatttcgcgaagatctgtacgcgcggatcaatctctggaccttcaccctgccgggtctacgccagcgccaggaagatattgaaccgaacctggattatgaagtggagcgccacgcctcactcactggcgacagcgtgcgttttaacaccgaagcgcggcgcgcctggttggcttttgcgacctctccccaggcaacatggcgcggtaactttcgcgaactttctgccaacgtcacgcggatggccacctttgccactagcggacgcatcactctggacgtggttgaagatgagataaaccgtctgcgctataactggcaggagagccgcccctccgcgcttacggcgttgctgggcgcagaggcagaaaacatcgatctcttcgaccgtatgcaactggaacacgttatcgctatctgccgccaggcaaagtcgctttccgcagccggacgccagctttttgacgtttcgcgccagggcaaagccagcgtcaatgacgcggatcggctacgcaaatacctggcgcgttttggtctgacgtgggaagccgtgcaggatcagcacagctccagttgaatatggtggtccgtcagcacctgcatcacgcttactggcggcggggcgtcggtgtagacggcatctaccatgctgatgctgcccatattgaccatcgcgttacggccaaatttcgagtgatcgacaaccagcataacgtggcgcgagttctcaataatggcgcgtttggtgcgaacttcgtggtaatcgaactccagcagcgagccgtcgctatcgatgccgcttatccccagaatgccgaaatcaaggcggaactgggagataaaatcgagcgtcgcttcgccaatgatcccgccatcgcggctgcgtaattcgccaccggcgagaatgatgcgaaaatcttcttttaccatcaacgtgttagcaacgttgagattgttggtgacaatgcgcaaattgctgtgattgagcagtgcgtgcgctaccgcttccggcgtggtgccgatatcgataaacagcgtcgagccattggggatttgctccgccactttgcgggcgatgcgctctttttcttcggtctgggtggccttgcgatcgtgccacggcgtgttaaccgaactggaaggcagcgccgcaccgccatgatggcgcaggatcaggttttgctccgccagctcattgaggtcgcggcgaatagtctgcgggctgacggagaaatgctctaccagctcttcggtactgacataaccctgctgtttaaccagttcgataataccgttgtgacgttgtgtttgtttcatttataaatccctggaattattttcgttttcgcgcattgagcgaatcaacaaaagccatcgctaaacccacggctaacccggcgatgtgtgctccgttcgccatcgacatcccaaacaaatcaaaccatccggcgacaatccagatcagcgcaaagataattaacccacgttgcaggtaaatgccactttgcggatcgcgttcgccacgtagccagacgtagcccatcagcgcatacaccacgccagaaagcccgccaaaccacggcccgctgaatttttgctgcacatagccgcttaacagggcgctgataagcgtaatgacaattagcttaccgctaccgaggcgtttttccaccgcaccgccgagataccaccaccagagcaggttaaagaggatatgcatcagcgagaagtgcattaacgcgtgggtgaagtaacgccagaactcaaatttcagtgttggatcgaatggccaggccagccataacatcacttcctgatcgccgagaatttgcatggcaataaacaccaccacgcaggcgatcatcatcacccaggttaccggacctgcgcgttcacgcaaggcggcaaagaaaggataacggcgataatgcaggccactgccggtatggcctgcctgccagctcgccgccagataacgcggatctgccgggttttcgagaaaacgcgccagctccgcccgtacgcgctcggcctgggactcatccgccagccagacatcgctttggttatgttgttgaatcgtgaggataacaccctgcgtcgccatgtaatcaacaaacgcctgcgccacgcgggggttagcaaaagaggtaatcatcaacatcgttgctgtcgcttattccacacaaaaggggacagtataaagcgttacgcgccgtacgccacctctgcgggaaactgacgttgccaggcttcaaagccgccgtcaatgctatagaccacatcgtagccctgttgcagcagatactgcgccgcgcctttgctgctattgccgtgataacacatcaccatcaccggagtgtcaaagtcgttatcacgcataaaagcgcccagcgtgtcgttggttaaatggaaagcctgcaccgcatgtcccattgcgaaactctgtggatcgcgaatatcgaccagcaccgcctctttttcctgcaacttctggtgcgcgtcggcaacgttaatacattcgaactgatccatgcgtctctctttctttacaaacaagtgggcaaatttaccgcacagtttacgtcgaagcggcagataaacgccataatgttatacatatcactctaaaatgttttttcaatgttacctaaagcgcgattctttgctaatatgttcgataacgaacatttatgagctttaacgaaagtgaatgagggcagcatggaaaccaaagatctgattgtgatagggggcggcatcaatggtgctggtatcgcggcagacgccgctggacgcggtttatccgtgctgatgctggaggcgcaggatctcgcttgcgcgacctcttccgccagttcaaaactcattcacggtggcctgcgctaccttgagcactatgaattccgcctggtcagcgaggcactggctgaacgtgaagtgctgctgaaaatggccccgcatatcgccttcccgatgcgttttcgcctgccacatcgtccgcatctgcgcccggcgtggatgattcgcattggtctgtttatgtacgatcatctgggtaaacgcaccagcttgccgggatcaactggtttgcgttttggcgcaaattcagtgttaaaaccggaaattaagcgcggattcgaatattctgactgttgggtagacgacgcccgtctggtactcgccaacgcccagatggtggtgcgtaaaggcggcgaagtgcttactcggactcgcgccacctctgctcgccgcgaaaacggcctgtggattgtggaagcggaagatatcgataccggcaaaaaatatagctggcaagcgcgcggcttggttaacgccaccggcccgtgggtgaaacagttcttcgacgacgggatgcatctgccttcgccttatggcattcgcctgatcaaaggcagccatattgtggtgccgcgcgtgcatacccagaagcaagcctacattctgcaaaacgaagataaacgtattgtgttcgtgatcccgtggatggacgagttttccatcatcggcactaccgatgtcgagtacaaaggcgatccgaaagcggtgaagattgaagagagtgaaatcaattacctgctgaatgtgtataacacgcactttaaaaagcagttaagccgtgacgatatcgtctggacctactccggtgtgcgtccgctgtgtgatgatgagtccgactcgccgcaggctattacccgtgattacacccttgatattcatgatgaaaatggcaaagcaccgctgctgtcggtattcggcggtaagctgaccacctaccgaaaactggcggaacatgcgctggaaaaactaacgccgtattatcagggtattggcccggcatggacgaaagagagtgtgctaccgggtggcgccattgaaggcgaccgcgacgattatgccgctcgcctgcgccgccgctatccgttcctgactgaatcgctggcgcgtcattacgctcgcacttacggcagcaacagcgagctgctgctcggcaatgcgggaacggtaagcgatctcggggaagatttcggtcatgagttctacgaagcggagctgaaatacctggtggatcacgaatgggtccgccgcgccgacgacgccctgtggcgtcgcacaaaacaaggcatgtggctaaatgcggatcaacaatctcgtgtgagtcagtggctggtggagtatacgcagcagaggttatcgctggcgtcgtaaattaacgtaaggtgatcaggtcagatttcaatctggcctgagactgatgacaaacacaaaactgcctgatgcgctacgcttatcaggcctacgtggtttatgcaatatattgaatttgcatggtcttgtaggccagataagacgttcacgtcgcatccggcatgaacaaagcgcactttgtcaaaaatctaacctactttttaattcagggaattaccgcaaagcccacgccatcatacccaacgtaacaaaactcaggcacgttccccactcgccccgagaaaaatagcattaatgcgcccagcgccagcataaaaattttgagcagaaggtaaattgttggcgtgataaggatattacaaacttcaataataccggcaagtccgacacccagcatggcaataaccaccgccaaaaattgcgccagtatggggatgccgaaaaaagtcattaccagcgaggtcaaaatccattttctgttttgcattattctttccattctttttgaatggtgaaattatactccccgagtccccttgccccttctggacacttttccgaaatgatggcggaaaaaaacgggcccctttggccccgttctatttattggtgaacttacaatctcaccggatcgatatgccagatatgatcggcgtactctttgatagtacggtcagaagagaagtagcccatattggcaatgttcagcatcgcttttgcggtccactcttcctgaagctcgtagagttcatcgactttatcctgacaatcgacatagctgcgataatccgccagtacctggtagtgatcgccgaagttgatcagcgaatcaaccagatcgcgatagcgacccggatcttccggactgaatacaccgctgccgatttgcgtcagcacctgatgcagctcctcatctttctcgtagtattcacgcggtttgtagccctgacgacgcagttcttccacttcttccgctgtgttaccaaaaataaagatattgtcagcaccgacatgatccagcatctcgacattcgcaccgtccaacgtaccgatagtcagcgcaccgttaagcgcaaacttcatgttactggtgccggaagcttccgtccctgccagcgaaatctgttcagacagatctgccgccggaatgatcaactgcgccaggctaacgctgtagttcgggatgaacacgactttcagcttatcgccaatctgcggatcgttgttgatcactttcgctacgtcattgatcaaatgaataatgtgcttcgccatgtaataggccgaagccgccttaccgccaaaaatattcacgcgcggtacccacttcgcatccgggtcggccttgatgcggttatagcgggtaatcacatgcaacacattcatcaattgacgtttgtattcgtgaatacgtttgatttgtacatcgaacaacgcctttggattcaccaccacattcagctgctgggcgatatactctgccagacgctttttgttctccagcttcgcctgatgcacagcgtgattaaccattgggaaatcacagtgttgttgcagctcattaagcaggctaaggtcggtgcgccagttacggcccaggtgttcgtccagcacggctgaaagcgatgggttcgctaccgccagccagcgacgcggcgtcacaccgttggtgacgttggtgaaacgacccgggaagattttcgcaaagtcggcaaacaacgattgcaccatcagattagagtgcagttccgatacaccgttaactttgtggctcacaacaaccgccagccaggccatacgcacacgacgaccgttggattcatcaatgatcgacgcccgtcccagcagatcggtatcgttcggatactgttcctgcaaggttttcaggaaatagtcgttgatttcaaagatgatctgcaggtgacgcggcagaattttacccagcatatcaaccggccaggtttccagcgcctcgctcatcagcgtgtggttagtgtaggagaagacctgacaacacacctcaaacgcgtcgtcccagctaaattggtgctcatcgatcagcagacgcatcatctcaggaatcgacagtaccggatgggtatcattgagatgaatcgcgattttatccgccaggttatcgtaggttttatgcaactgataatggcggcttaaaatgtcctgaatggtcgaggaaaccaggaagtattcctgacgcaggcgcagctcacgcccggagtaggtggagtcatccggatacagtacgcgagatacgttctcggagtggtttttatcttccactgccgcgaagtagtcaccctggttgaatttaccgaggttaatttcgctactggcttgcgcactccacaaacgcagcgtgttggtcgcgtcggtgtcgtaaccagggattatctgatcgtaagcgactcccagaatctcttcggtttcaatccagcgcgtttttttaccttcctgctgaatgcgaccgccaaaacggactttatagcgcgtgttgtggcgtttgaattcccacgggttaccgtattccagccagtagtctggcgactctttctggctaccgttaacgatgttctgcttgaacataccgtagtcatagcggatgccgtaaccgcgccccggcaaccctaacgtcgccagagaatcaaggaagcaagccgccagacgtcccaggccaccgttaccgaggcctgggtcattttcttcatcaatcagctcttcgagatttaaccccatcgcttccagtgcgccctgtacatcttcgtaaattcctagcgacaacatggcgttggagagcgtacggccaatcaaaaactccatcgacaggtagtaaacctgacgagtttcttgcgacaactgggcacggtttgaacgtaaccagcgctccacgagacgatcgcgcacagcaaataacgttgcgttcagccattcatgtttattggcgacgaccgggtcctttccaatcgtaaacatcagcttgtaagcgatagagtgcttaagagcttctacgctaagcgtgggcgatgaatatgtaaacggagcattcatataggcgtttcctgaaaactatttcaagcgatagtaaagctcacggtacgacttcgccgcgacctgccagctaaaatccattgccatagcctgacgttgcacaaaccgccacagtgaaggacgggaccacagtacaaaagcacgtcgaatagcccgtaacagcgaccaggcattactatcttcaaagacaaacccactggcgacgccatctgcaaggttctcaagagaacagtcagaaaccgtatcagcaagcccaccggtgcgccgcactaacggcagcgtaccgtacttcaatccataaagttgcgttaagccgcacggttcaaaacggctgggcaccagaatgacgtccgcgccgcccataatgcgatgcgaaaatgcttcgtgatagccaatctgaacgcccacctgaccggggtattccgctgccgccgcaaggaaaccttcctgcagcaccggatcgcccgcgccgagtagcgccagctgcccgccctgctccagaagacccggtaaggcttccagcaccaggtcgagacctttctggctggtcagacggctcaccactgcaaaaagcggcactttatcgtcaaccttaagccccattgcgatttgtaactggcgcttattttccgctttatcttccaacgtatcgcgggtgtaacgcgaggccaacagtaagtccgtctctggactccagattttctcgtccacgccgttcagtacgccggaaagacgcccttcacggtgacgctgttgcaacagaccttccataccgtaggcaaactgcggttcggtgatctcgcgagcgtaggttggactgaccgccgtaatgtgatcggcatagtacagaccggccttcaggaaagagatttgtccgttgaattccagcccatgaatattaaagaatgaccatggcaattggatgtcattcatgtgatgtgcataaaacatgccttgataggccaggttgtgcacagtaaacaccgacttcgccggacgcccgcgcgccgccagatacgcaggcgcaaggcctgcatgccagtcgtgcgcatgcaccacatcaggacgccagaatgggtcaagcccgctggccatttctgccccaacccaccccagcagcgcaaaacgcaatacgttgtcggtataggcaaataagttggtatcgtgatacgggcttcccggacgatcatagagatgcggcgcgtcaatcaggtaaatgccaaccccgttgtaatgaccgaacaacagcgtgatatgtccggcgaaggtatcacgacgggatactacctgcgcatcggtcacgccacggcgaatatcgggaaatgcaggcaacagtacgcgagcgtcaacgccgtctgcgatttgtgctgcgggtaatgccccaataacatcagccagaccgccggttttaagcagcgggaacatctctgaacatacatgtaaaacctgcattatcgctcctgtttatgccctaacttccgtagcatttcgcgcgttaccagcacgatgccttcttctgaacgatagaaacgacgtgcatcttcctctgcgttttcaccaatcaccatgccttccggaataacacaagcacgatcgatgacgcagcggcgcagacggcacgagcgacctacccatacttccggtaacaatacggcggaatcaatgttgcagaatgaattcacgcgaacgcgcgagaacagaacggactgcaccaccaccgaaccggagatcacacaaccgccggaaaccagtgagttaagggtcatcccgtggctaccggagcgatcctgcacgaatttcgctggcggtaatgattcattgtaggtgcgaattggccaattgcgatcgtacatatccagttccggcaccacagaggccagatcgaggttcgctttccagtaagcttccagcgtacccacatcgcgccagtacggctcggcatccgggtcggattgtacgcaagagagcgggaacgggtgcgcataggccagaccggcttcggtgatcttgggaatcaaatctttgccaaagtcgtggctggagttctcatcgcgatcgtcttcttccagcagttcatacagatagtcggcgtcaaagacgtagatacccatactcgccagagatttgctcggatcgttcggcattgacggcgggttagcaggtttttcaacgaattcgataattttatcgttctcatcaaccgccataacgccaaatgcggaggcttcttcaatcggtactggcatacaagcaacggtgcaacgtgcgcctttttcgacgtgatcgataagcatacgcgagtagtcttgcttgtagatatggtcgcccgccaggatcaccacgtattccgctttataacggcggataatgtcgaggttttgggtgaccgcatctgcggtgccgcgataccagttttcccctttcattctctgctgtgctggcagcagatcgacaaactcgttcatttcttcattgaagaatgaccagccgcgctgaatgtgctgcaccagagtgtgggactggtactgggtgatcacgcccatacgacggatcccggagttgatgcagttagacagcgcaaagtcgataatgcggaacttaccgccgaagtgtacggccggttttgctcgcttattggttaaatccttcaggcgggtaccacgtcctcccgccagtatcagggcaacagatttcaatggcagctggcgcgccaacattaagtgatcgttcttctctaaactaaccatgactaactccttttttatcatctctggaacacacacaatccgtgtgcaggtccctgccagacagccgtaatcactgggttatcctctccagcgaatgggggaatggcgtgccactccccagcaggtaaaacaatctctgttacctcaagcgtggcgttaattgcgatcaaaaagcgatccgagagcagaatttgcagctgtttcggcccgttttgccactcatccgtgcttaaaggttgagcatatcgatttagccaacggacattgccgtcgccttcttcccaccagcgattctccaccaaagcgggaatgcgcttgcgcagatggattaacgcggcggtaaatgcggttaaaccactgcttgcctgcgaccagtccaaccaggttaattggttatcctgacagtaggcattgttattgccatgctggctgtgaccatgttcgtcaccggccagtaacatcggcgtaccctgggagagcaacaacgttgttaacagggcgtgaatgctgtcgcgccgccgttcaaccaggtcaagagaaccgcctaacccttctttaccatgattgttactgtaattgttgttggtcccgtcgcgattttcttctccgtttgcttcattgtgtttatggttgaagcaaacgcagtcgcgaagcgtaaaaccgtcatgcgcggtgacgagattaatcgcggcactcggcagacgaccattacgtttaaaaacatcgctggaggcagcaaaacgcccggcaaacgcccccagaggcaaatcataatgtagccagaaacgacgggcagcatcgcggaaatgatcgttccactcggcaaacagcggcgggaaatttcccacctgataaccaccaggagcgatatcccacggttcagcaattaacttcacctgcgagagcaccgggcagttctggatagcggtaaacaacggcgcatcctgacggaactctggcgtacggcccatgactgccgccagatcaaagcggaaaccatcgacgtggcaggtttctacccaataacgcaggcaggcgctggcataatccaccaccgccggatgactcaaattgagcgtgttgccgcaaccggtccagttgtgataatcgccgtcttctcttatccaataatagctacggttatcgatcccacgcagcgagaataacgggccgtcgaggtccagttccgcactatggttgagcacgatatcaagaatgacttcgatacccgctttatgcagtgctttgattgcatcgcgaaactcatccagcgccgtttctggcgagcaggcatacgccggatgcagcgcaaacatcgccaccgggttgtaaccccagtagttacttagccccatgcgttgcagacgtggttcactggcaaactgcgccactggcagcagttccagcgcggtaatgcccaattgtttcaaatagttgatcatcaccggatgcccgagggctttataagtgccacggatctcgaccgggatctccgggtgcaagtacgttaatcctttgacatgggcttcataaatgatggtgctgccccacggcgtgcgcggcggggcatcatcttcccagtcatagtgatcaaccaccactacgcatttcggcgcaatggcggcgttgtcgcgatagtcaggttcattatgaccggcgtgcagcagcgggttatctttaaactccccgtcaatttgccgcgcgcaaggatcaatcaacaacttcgccgggttaaagcgatgcccctcggcgggttgccaggggccatgaacgcgataaccataacgcaaacccgggcgcgcaaccggcagataaccgtgccaaatgtcgccactgtgccctggcaagtcatagcgatgttcctggccattggcgtcaaagacacacagttctacccgctcggcatgagcggagaaaagtgtgaagttgacgccctgaccgtcgtaatgcgcgccgaggggagcgggtttgccaatggcgagttgtgtcattctgcctcccgaaccagccagatagtggccagcggtggtagcgtcaggcttagtgaatgctgacgaccgtggctggcaatctcatcgctgtgtaccgtgccgccattgcctgcattactgccgtgatagtgcatggaatcggtattgaggatttcacgccatttgcccggctggtttatgccgaagcgataatcatgacgcggtaccggcgtaaagttactggcaacgatgatttcgttaccctctttatcgcgacgcacaaagatcagcaccgagcgttctttgtcatccaccaccagccattcaaagccgtacgggtcaaaatccagttcatgcattgctttatggtggcggtaggtgaggttcagatcgcgcaccagacgctggacaccgtggtgccagttatcgccgccttccaacagatgccagtcgaggctggcgtcatggttccactcgcggccctgggcaaattcgttacccatgaacagtagtttcttgcccgggaatgcccacatccagccatagtaggcgcgcaggttcgcgaatttctgccatgcgtcgcccggcatgcggtcgagaatcgattttttaccgtggaccacttcatcatgcgacaacggcaggacgaagttttcagtgtagttgtagagaatcccgaaggtcagtttatcgtgatgatactgacgataaaccgggtcgagcttcatgtagtccagggtgtcatgcatccagccgaggttccacttgtaccagaagcccagaccgcccatatcctgcggacgagaaacgccagggaaatcggtagactcctcagccattgtcaccgcaccggaaacctgctcaccaagaatacggttggtattacgcaagaattcaatcgcttcaagattctcgcgcccgccaaattcgttcgggatccactccccctctttacggctgtagtcgcgataaatcattgacgccaccgcatcgacgcgcagcgcatcaataccaaaacgttcaatccagtaaagcgcgttaccgacgaggaagttactgacttcacggcgaccatagttgtagatcagcgtgttccagtcctgatgatagccttcacgcggatcgctgtgttcatacaagttcgtgccatcaaattcggcaagcgcaaagtcatcagtcgggaagtggcctggcacccagtcgagaatcacgttcagaccagctgcgtgtgcggcatcaatgaaataacggaagtcgtcgcgagtaccaaaacggcgggttggcgcatacaggccggttggctgataaccccaactgccatcgaagggatgctcgttaatgggcagtagttcgaggtgggtaaagcccatccatttagcataaggcaccagttgatcggccagctcgcggtagctcaaccagaaattgttgtcggtgtggcgacgccaggaacccaggtgaacttcataaatagagattggcgcatcaaactgattcgcttttttgcgctcttcagtctgtacaaccttttccggcagcccgcaaataagagacgcggtttccgggcgcatttgcgcttcaaaggcataagggtcggacttcagacgcaagttgccattggcatcaatcatctcgtatttatagagctgaccgttatgcgccccagggataaacagttcccagatgccgctctctttacgcaggcgcatcgggtgacggcgaccgtcccagtagttgaattgcccaaccaccgagacccgacgggcgtttggagcccagacagagaaacgcgtacctgtgacgccatccatagtatctgcatgcgcgcctaaggtttcatacgggcgcaggtgagtaccttcagataatagccaggcatccatttcctggattagcggaccaaaacggtaaggatcatcaatcaggttttgctgaccatgccagacaacagccaactgatagcggaaaaaattcttacgtcgcggaatgacgccgctaaagaatccccgtgagtcgagacactccagttttgcgagtttgcgcccggttttcggttcaatcacccacacatcggtagcgtcgggtaaaagggcacggacttccagtcccgcggtggttttatgcattcccagtacggaaaaaggatccgcaaaatggcctgcaattagcgcgttaatcacgtctctatcgatacgatcggacatgcttgtcttcctgttttattgtgtcaccccatccaattggatttttgacttctggttgtgacatttttttgacctgaacggcgcagcactctgtgcatcctctctgcgtcgtcctcacttcaggtaaggctgtgaatactcatgtattcagccacccttaaagaatagccaatgctctatttaactcccggtaaatcatgaaacatctgcgcttactcctgtattacgcactaacaggggcggcatcgcgccccagatttaatgaataaagattacgccagttgacgaagcatccgacgcagcggctccgcggccccccacagcagctggtcgcccacggtaaaggctgacaggaactctggtcccatattcagcttacgcaggcggcctaccggcgtggtcagcgtgccggtaacggcagctggggttagctcacgcatagtgatttcccgatcgttcggaacgactttcgcccacggattgtgcgcagccagcagttcttccacggtcggaatagacacatcttttttcaatttaatagtgaatgcctggctgtggcagcgcaatgccccgacacgcacacataaaccatctaccggaattacggaagatgtgttgaggatcttgttggtttccgcctgccctttccactcttcgcggctctgaccgttatcgagctgtttgtcgatccacggaatcaggctacccgccagcggcacgccaaagttatccaccggcagctcaccgctacgggttaaggttgtgactttgcgttcgatatcgagaatagcagaggacggggtcgcgagttcatctgccacatggccatacagatggcccatctgggttaataactcacgcatatgtcgcgcaccaccgccggaagcggcctggtaggttgcaacggacacccaatcaacaagatcattggcgaataaaccacccaacgacatcaacatcaggcttacggtacagttaccgccaacaaaagtcctgatgccattatttaatccgtcggtaatgacgtcctgattgacggggtcaagaatgatgatggcgtcatctttcatgcgcagagacgatgctgcgtcaatccagtaaccttgccatccgctttcacgaagctttggatagatttcgttggtataatcgccgccctgacaggtcacaatgatatcgagggcctttagcgcctccagatcaaaggcatcctgaagtgtgccagtggttccgccaaaagacggcgcagcctggccaagctgagaagtagaaaagaagacagggcgaatggcgtcgaagtcgcgctcttcaaccatgcgttgcatgagaacggagccgaccataccgcgccagccgataaaaccaacatttttcataagcgtttttttcctgcaaagatgtgtgctgtataaatgtgccggtctcctcttggcacatctttcaccatacaaaaagcagccaaagtcgcaagtgaaattaatcaatgatagcgaagccatcagtaatgcgacttatcctgctttgttagcacgcagaaagtccgcggcaattatcagggaatttgagttatgaatgaaatcatttctgcagcagttttattgatcctgattatggatccgctcggaaacctacctattttcatgtccgtactgaaacatactgaaccgaaaagacggcgggcaatcatggtgcgagagttgcttattgctctcctggtgatgctggtgttcctgtttgcgggtgagaaaattctggcatttcttagcctacgagcagaaaccgtctccatttctggcggcatcattctgtttctgatcgccattaaaatgattttccccagcgcttcaggaaatagcagcgggcttccggcaggtgaagagccatttatcgtgccgttggcaattccgttagtcgccgggccgactattctcgccacgctgatgttgttgtctcatcagtacccgaatcagatggggcatctggtgattgctctgctgctggcctggggcggcacctttgtcatcctgctacagtcttcgctatttttacgtctgctgggcgagaaaggggtgaacgcacttgaacgcctgatgggattgattctggtgatgatggcaacccagatgttcctcgacggcattcgaatgtggatgaaggggtaacgaggagagtttttcgaaaagaacccggtagcgtcacaactaccgggcgaacaaacttaactcaacagctggaacgcaatcatcccaacgatggcaccgacagtgccgaggatggtttccatcatggtccaggttttcagcgtttcggcttcggtcgcgccggtaaatttaccgaacaaccagaaaccggcgtcgttaacgtggctgacaacaatcgaaccaccagcgatacaaatcgacagcgccgccatttgcgcaccggagtagttcagttgttcaataaccggcatcaccagtcctaccgccgttaaacaggctacggtggcagaaccctgaatgatgcgcactgcagctgccagcacgaagcaggtgatagcaatcggcaggcccatgccggttaacgcttcgcccagtgccggacctacgccagagtcaaccagcacctgtttgaacacgccgcccgcaccaatcaccagcagaatgatccccgccggttgcagcgcgtgaccgcaaatctccatcactttgtcttttggcatgccctgacgcattgccagaccgtaaatcgccaccagacaagcaaccagaatcgcggtaaacggatgaccgataaactcaaaccattcgtaagcagttgatccttccggcacaaaacgcgcggcaatggttttcagccctaccagcaccagcggcagcaggatcagcgacaggctgaatccgaaagatggcattttgccttcgccgagatgcggttcgctgatgtcgtcaggaatatgcagctcaacgtaacggctgatgaagttaccccacagcggcccggcaataatcattcccggaattgccgcacacaggccaatcaggatcatccagccaaagtcggcattcatctgcgatgccagcagcatcggcgctggtccaggcaccagaaatgccgccgctgccgccacgcctgcaaataatgggattaccagcttcaccaggttcgtaccggtgtggcgcgccattgagaaagcaacgctaatcagcagaactatcgccacttcaaagaacagcggtagcgcacagaccagccccgcaaggccgatggcataatgcgcgcggctgtgaccgaaggatttgagcattttgacggcaatctgatcgactgcgccggtttcatgtaagatcttgccaaacatagctcccagggcgacaaccaccgccaggaagccgagggtgcctcccatccctttttccatcgtcgctgcgattttatcgagcggcataccagaaaaaaggccagcccccatggacaccaccattaaagccaggaaagcgtgcatacgcgccttcatgactaaaaacagcagcagtaaaacagaccctactgctgttaaaacaagcgttaatgtagtcactacttatttgccttttttaataacctcaatggtgcttgccacaacaccttccagcggttgatcgatatccaccaccagtacatcggtttcgtccgcacccggctcctgcagcgtttcaaactgcgtcaccaacatttgggttttaaagaaatggcctttgcgcgctttcaggcggctttcaatcacatcaaaatcgcctttcaaatagatgaaagagagattcggattaccttcacgcagcaagtcgcgatagtgttttttcaatgcagaacagacgatcagcgacactttattagtgcgctgcatagcaaacgcggcgtcgttcagcgcctgcaaccacggtttgcgatcgtcgtcattcagtggttcgccagacgccattttttcgatattgcgccgtggatggaggaaatcgccatcaagaaacgcggcatgaagttgatgcgccacttcactggcgaccgcagatttgccgctgcccgatacgcccatcaagacgtaaatgtggtgatcatggttagtcgtgctcaaagtggtgcccccacaatacaagaattaaaaatgttacgggtaactgttatcggtaacattgtccagccggacaatatcagaagcaatatccatccatgccttaagtgtataagtgtgagctacttcaaatttgtgggcttaaatagatccgcccggtgacaaggtgaaacctaaatctaacattttcggtgtcacagattcgccacgaatacgcgccagcaggcgttcagcgccaatactgcccatccgctcacgcggcgtcagcacgctcgcaagtcgtggctccatcacctgaccaatgtcatgaccgtggaaaccggcaatcgccatatcgtcaggaacttttaaccccagacgctgacattcaaacgccgcgccgaccgccaggtcatcattcgtacagaacacgccatccagctgcggatattcccgccgcgcctggcgaatcagttcaataccggaagagtaagaagaagattgctcaaccatcacgctatatggcaccaggcctgcatccagcatcgcctgttcgtatcccttctgtttgatgatagtacgttcgtcgagacgtgcgccgagataggcaatgtggcgatgcccgcgagcaataatggcagtggtcatctggcgtgctgcttcaaagttatcaaaaccgacggcgatatcaaggcatggcgacttgctgtccatcagttccaccacgggaatacccgccacttcaatcatctttaaggtgcgcggcgtgtgggtacgttcggtgaggatcaggccgtcgatattccaggagagcatggattcgaggcgttcttgctccatttccggtttataaccgtagtgcgccagcatggtctgataaccgtgcgcgtcggtgacgctttcgattccgcgtaatacttccgcgaaaacctggttggtgagagaaggtaacaggacgccaatcgcccggctggtggcgttagagaggatatcgggcgcacgattgggaatatagcccagttcatcaagagccgcggcaatcttgccgcgtagagcgacggaaacctgctccgggttgcgtaaaaaacggctgaccgtcattttggtcacgcctacacggtcagccacatcctgaagtacgggtcttttctttttcatcgtcctgaaggtacaaaagagatagattctcttagtttaacacggacacatcagaaccttcccggggaaaacagtgcttgtttacaattattagatatacactaaatcaattgcatcgcattgtgctaacgacgcggcaaaaccccggaagcgtacatcagcacgcgaccggagcgagcgaggaagcctgcaaaaaggcaggcttcaaagatgccgttgagttttaaaccggcggcagatcgaacagtaacacttcgctgtcgctatccgcatggatggagattgcctgctcatcccagattgccagaccatcgctggtcgaggctttcacgccgttaatggtgacattgcctttcaccacctggatccagacgcggcgttcagcggcaatctgatgcaccgactgctcatctttcagcaacgcccagcggtacagttccatatcctgatgcactttcaatgaaccatctcgcgcatccggcgagagcaccagctgtttgccctgtacggcatcgaagcgacgctgttcataacgcggcgtaataccgttttcttcaggcatgatccagatctgatacagatgcagacgctcggtgctgcttgggttgtactctgagtgacgaatacccgtaccagcactcataatctggaactcacccgccggaacctgctctttattgcccatgctgtcctgatgctcaacagtaccttccagcacgtaggtcaaaatttccatatctttatgcgggtgagtgccgaagccctgccctgcttcaatcacgtcgtcgttaatcacgcgcagcgcggagaagcccataaagttcggatcgtaatagttggcaaaagagaaagtatgccaggagtccagccagccatgatttgcatgaccacgttcatttgctttgcgtaagtagatcatttgtattcgccccctgaatgatttcgatgggcttagtgtggacccgatctgcctgggatgatagagggtgaaaattgacccctctgttcaaaaaaattgaactattcgaggggccatcaaacttacttagcgagagttactgtggagggagaggcttgctcaaatccgcgttcaaggatttccagattggtaagaacttcagattccttgacgtaatttggcgcaccgtgggtgatggtttgatacaacgcatcataaacgcgcccgtaatcgcccatctccggcttcatctcttctctgaccgtcacgccctcgtcattgacatactccagcacaccgaccgaatcatccgctgcgaatcccggttcgcccggcataatattagccttcaggctggtttcctgctggtcgataccgtatttaataaacgaacctttcttaccgtgaacgataaatttcggataatcgattttcaccagatggctggttttgacgatggctttcaggtcgccataaaacagttgcgcttcaaaggtgtcgtcaggattggctttattacgcaggctgcggatgtcataagcgacgtgatccgggcgaccgaacagagaaataatctggtccatcgtatgcacaccaaggccataaaacgcgccatcctgcggcagcccaggtttggtttctgccaccgggcggtaatagtcaaaatggctttccacttcaacaatctctcccaacttgccactttcaatcgcttttttcgctgtcaggaagcaggagtcaaagcgacgattctgatacggcgtgacggtcagccctttgcttttcgccaacgcaaacagctctttcgcctgcgcaagtgtcggagtgaacggtttttcgaccagcacatttttcccggcttccagcgcgcgtttcgcgtactcgaaatggctgtccgcgtgggtgcagacaacaaccagcttaacatcgggatcgtttagtacttcgtcgagatcgctggtgaaatggatatgggaataaatgggagcctgttcttccggcttcgcatggcgacgaaaaatatgcgcgacatgccagctatccttgcggttaagtacatacggcagatggtaacgggtggtgcttttgccgaagccaataaaggcgcagttgatgaccatgatttcgtcctttttaaggtggttatttacaccttagcgcaaagcggacgtggttcctactggagtgcgcataacgaacacaagcactcccgtggataaattgagaacgaaagatcaaaaaaaaagccagcacccggctggctaagtaatactggaagcaatgtgagcaatgtcgtgctttcaggttctccgcgagggtcttcctgatcgcgagacaataataatcattctcattcgtacttgtccaacactttttgcaaaaaaatgcatttgactcgcatttgaaagtcaatgatgttgaaagggacatttaccccaaagaggacaaaggaatgagtgagatagtaatacgccacgcagaaacacgggattacgaggccatcaggcagattcacgcccagccggaggtgtattgcaacacactacaggtgcctcatccttccgatcatatgtggcaggagcgactcgccgatcgtcccggcatcaagcaactcgtcgcctgtattgatggagacgtcgtgggccatctcaccattgacgtgcaacagcgcccacgccgcagtcatgttgccgattttggtatctgtgtcgactctcgttggaagaaccgcggcgtcgccagcgccctgatgcgagagatgattgaaatgtgcgacaactggttgcgggtagatcgcattgaactaaccgtgtttgtcgataacgccccggcaattaaggtctataaaaaatacggctttgaaattgaagggactggtaagaagtacacattgcgtaatggtgaatatgtcgatgcatattatatggcgcgggtgaagtaagatagtgccctttttctgagatggaaaaagggtgtcattcaaaatcgacataccttcctttaaggtatttatttgcccaatacatatattgagatttaactcataattacttcctaaagtgtaatattttattttttaatatatacgcctacaatttcctggagtaaataaataacaattaacaagcataatattgccattgataaaatagcatgccataaaaggacttttcagggatgagtaatattgtttacctgacagtaacgggagaacaacaaggaagcatctccgcaggttgtgggacttctgagtctacaggtaatcgttggcagagcgggcatgaggatgaaatatttacattctcactcttaaataatattaataatacggggcttggttcacagttccatggtataacattttgtaaattaattgataaaagcactccattatttattaattccattaacaataatgaacaattatttatgggatttgacttctatcgaataaatagatttggtagattggaaaagtattattatatacaactaagaggcgcttttttatcggctattcatcaccagatcattgaaaaccaactggatacagaaacaataactattagttatgaatttatcctctgtcaacatcttatcgcaaataccgagttcagctatttggcactccctgaaaattataaccgtttgtttttaccaaattcaaaaaaccaaacaaataatcgtttcaaaacgttaaacagcaaagctattggcaggctacttgctgctggtggcgtatacaatgggaacattgaaggattcagagatactgcggaaaaactgggtggagatgcaataaaaggctatgatcaaatactaaatgaaaaaacagcgggcatagcgatagcaacagcatctattcttttaacaaagcgttctaatgttgatacatatacagaaataaatagttacttaggcaaacttagaggtcaacaaaaacttcttgatggtatagacataatagaaataatatacattaagagaccttcaaaagacttagctaacttacgaaaggagtttaataaaactgtaagaaaaaattttcttatcaaacttgcaaaaacctccgaagcatctggaagattcaacgccgaagaccttttaagaatgagaaagggcaatgttcctctaaattataatgttcaccataaactatctctagatgatggtggtactaatgatttcgaaaatttagtattaatcgaaaacgaaccatatcataaagtttttactaacatgcaatcacgaatagctaagggaatattagtaggtgaaagcaaaatcactccctgggccattccatctggctcaatttatcctcccatgaaaaatattatggaccacacaaaatgatgactaaaacccaaataaataaattaataaaaatgatgaatgatttagactatccatttgaagcaccgctcaaggaatcatttattgaaagtataatccaaatagaatttaattctaattcaactaattgcctggagaagttatgtaatgaagttagtattctttttaagaatcaacctgattatcttacttttttaagagcaatggatggattcgaagttaatggattacgattatttagcctctcgattccagaaccttcagttaaaaacctttttgccgtaaatgaattttatagaaataatgatgatttcataaaccctgatctacaagaacggttagtgatcggggattatagcatttcaatatttacttatgacattaaaagtaacttttttgaaattagagataatattggcacagaaaatatattcagttcgtttagtgatttctcttcattcttaaacgaaatcatggacagttgttcataataatcaaaaggaaacaaaaatcattgtaaaccatgccatctttttagagattaccagcagaaaattccttgttcgaaatttagcagtgcaagctatggaaaaacttacaacggaactacactccttaagtgagatggaccgaagacatgtagtctctattttagccgaaatagctaatggctatgatgattttaatgacatgttgatttatttagaattttacccgaatcataagattctgatatcttaaataagaaaatcccgttcgacgttctgaaaaagaaatcataaaatattagcagatacttatttcgtgactatatcttatccgatgaacttttttcaaaaccagcatttaataatatctttgacgaagatgaacgcgtctttgctcaatgtatcacacaggaataataatataacactcaacaataatatttattataattatgattacttatcacgacgcattcgcgaaagcgaaccattaccttgatgatgcagatctcccggtcgtcattactctacatggacgctttagccagggctggtatttctgtttcgaagcacgagaatttctcgaaactggagatgaggccgcgcgcttagctggtaacgcaccttttattattgataaagacagtggtgaaattcattctctgggaacggcaaaaccgctggaagaatatctacaggattacgaaataaaaaaggctaccttcggcttgccctgacaaaatagccctcttcccacgaagagggccgctaaccttagtaccccgccgttaaatcatccaccgagcgcgggtcggatgcgccgtacaactcaccgtccggcccaaccataatgctttgtgtactgcccatcgcctctttcagcgccactttctgaccttttgcttccagcagcttgagcgtatccgggctaaaccctttttcgacacgcagctcgtccggcaaccactgatggtggaaacgcggcgcattggtcgcttcggcgacgttcaagccataatcgatgctattcaccaccatttgcagcactgtagtgatgatccggctaccgcctgggctaccggtaaccagccaggttttaccgtctttcaccacaatggtcggcgacatcgacgacagcgggcgtttgttcggcccgacggcgttggcatcaccgcccaccagcccgtaaacgttcggtacgcccggtttggcggagaaatcatccatctggttattaagcagaataccgctctcgcccgcgacaatgcccgtaccgaaggtggtgttcagcgtataggtcaccgccaccgcgttaccatctttatccaccactgagtaatgggtagtttgattactctcataaggcgcaagcttgccggggcgaatttcgctggatggcttcgctttattgatatcaatttgatcggcaatagatttggcataggctttattggtcagcgcctgccacggtactttgacaaaatccgggtcgccaagatattccgagcggtcggcgtaggcgtatttctccgcttctgccatgatttgcatcgcatcggcgctgccaaagccgtatttcttcatatcgaagttttccagaatattgaggatttgtacgatatggatcccgccggaggatggcggtggcatggagtaaacctgatacccgcgataatcgccgcttatcggagtgcgttcgaccgctttataggctgctaaatcttctttagtgatcaagccaccgtttttctgcatctcctgggcgatctgttccgcaatcgtgcctttatagaattcgtccgggccgttttcagcaatcatctccaggctctttgccaggttcgcctgcaccagcgtgtcgccctttttcagcggctcgccctctttccagaagatagctttactgttttcgtgattcggcaacacttcgctaccgtaggttttgagatcgtcagccagcgcgtcgttaacgataaaaccatcgcgtgccagtttaaacgcgggctgcacgactttgttcagcggcatggtgccgtatttatccagcgccagcgagaaacctgctaccgtacccggtgtgccggaagccagatgcgaagtgagtgattttttgctgtccgggttgccctgatcatcgaggaacatatcgcgggtcgctttggcgggtgccatttcgcggaaatcgatagccgtggtattgccatttttcgagcggattaacataaaaccaccaccgcccagattccctgcctgcggatgcgttaccgccagcgcgtagcccaccgccacggcggcatcaacggcattcccgccctccttgagaatatccccccccacctgagtggcagtggcgtccacagacgctaccattccctgtttcgcgcgtaccgggtggaagacatcttcctccacaccatacgagacgggcggcgcaggaggcgcggcggcggcgctaaaacaacttcctgagagcagagcagcaatggccacccggcgtaaaaacgtcggttttatcatcgttattctccagagattaaggggcaaccccagctaagcctggtatataactctgaattaatcatcgttttgtcgggaagcgagtaaacttaaaggatatcttcagaggaggatacgcgatgaaacgacttctgattcttacggcactcctgccgtttgtcggctttgcacagcccattaatactctgaacaaccctaaccagccggggtatcagatacccagccagcagcggatgcaaacccagatgcagactcagcaaatccagcaaaaagggatgctgaatcagcaactgaaaacgcaaactcagttgcaacagcagcatttagaaaaccagataaacaataattctcagcgggtgttgcagtcacagccgggggagcgaaatcccgcccggcagcaaatgctgcccaacaccaacggcgggatgttaaacagcaaccgtaatccggatagttcgttgaatcagcagcatatgctgccggagaggagaaacggcgacatgctgaatcagcccagcacgccgcagcctgacattccgttgaaaactattgggccgtaaagttcggaccaatcacgtcaatcgcatcggtacagatgcaatccacaccccagcgcagcaactctgctgcgcgctggggtttattgacggtataaaccagaatccgcagtccggcgtctttcaactgcatcactcgcgctttattgagtaacttatgattgagatgaatagagacgcagcccagccgcgcggtcagttcgcgccagtcgtcgcgccactcatccagcaacaaaccgcgcggcagttccggtgccgcctgttgtgcagcttctaaagcatcaatctcaaacgatgacagcagcggcggcgtcataccggcccacagctcgcgtgccgccagcgccaccattttgcccgttaatggcccggtgccggtggtgggtttgatttcgatattcgccatcatcccgtgttcgcggcaacgttccgccacctgcgaaagcaacggtagcggctcacctttaaacattttgctgtaccaactgcccgcatccacgcgcagtaaatcctgccagttcagttcacccgcgacgccccagccgttgctggtacgttcgagattgtcgtcatggagcaggaagatctcgccatctttcgataacttcgcgtcaaattcgatcatcttatgaccgtattttgccccgacgtcgattgccgccagggtgttttccggggccagcttaccgccgccacgatgagcgacgatgcggggataaggccagttactcatactcgttgtcctgtttcaccatcaaaaagatgcagctgattttccgccagatgcagccacagcgtgctgcctgccgtcgggcgctcctgatgcgccagtcgcaccaccagcttctgctcgccccagcgtccgtgcgccaggttatctgcgccgaggatctccagcgtgtccatcaccatcggtacgccgccttctgcctgcgagcttagcgcaatatgttccgggcgaatgccgagagtcattttacgcccggcatactgacggtagccaccgtttagcggcagctcaataccgccgtccagttcgaaatgcgtgccttcgttattcacgcggcctgtcagcaggttcatcgccggactgccgataaaactcgctacaaacaggctggcgggcttttcgtagacttcaactggtgtgccaatctgttcggcaacaccgccgttcatcaccattactcgctgggcgagcgtcatcgcttcaacctgatcgtgagtaacgtagagtgaagtcgttttcaggcgacggtgcaactgttgcagttcaagacgcatctgcacgcgcagcttggcatcgaggttagagagcggctcatcaaacaggaacaccgccggatcgcgcacaatcgcgcggcccatcgccacacgctggcgctgaccgccggaaagctcgcgcgggcgacgtttgagcagaccgtccagctccagaatgcgcgccgcttctttaacgcgctcggcaatttgctgcttgcccatgccgcgaattttcagcccccacgccatgttttcttcgacactcatatgcggataaagcgcgtagttctggaacaccatcgcaatcccgcgatcttttggctccatttcagtcacgcgctggtcgttgatccagatatcgccttctgtcacccgctccagcccggcaaccatgcgcagcagcgtcgatttcccgcagccagacggcccgaccatcacgataaattcgccatccgccacatcaagggtcagcggtttaatgacctgggttttaccatcccagcttttggttactgcctgtaatttcagtcctgccatcttatttctcactatcgaccaggccgcgcacgaaggcacgctgcatcactaaaacaatcaccaccggagggataagcgttaacaacatcgccgccatcactgagttccattccgtggtgccttcgcctgtagcgatcatccctttgatccctgccacggtggtgccgagatccacatcggtaataatcaacaacggccacaaatactgattccagccgtagataaaggtgatcacaaacagcgccgccagattagttttggagagcggaaaaacgatgtcgcaaaagaagcgcattggcgatgcgccgtcgatccgcgcggcttccaccagctcatccggcagcgtcataaagaactggcggaacaggaaagtagcggtcgccgaggccatcagcggcagcgttaaaccggcgtagctgtcgagcatctgcaggttggcgatgacttccaccgtcgggaagatacgtacttcaaccggcagcatcagggtgataaaaatcatccagaagaagaggttacgtagcggaaaacgaaaccagacaatggcaaatgccgagagcatcgagacggtaattttgccgagcgtaatgctgaacgccatcacaaagctgttaagcaacatccgccagaacggcgcgctattcgtgcctaccccgttcacccagatgttgtggatgttttccagcagatgtgtgccggggatgagcgtcatcggcgcggcatagacggcctgtttatccagcgtcgccgcgacaaacgccacgtacagcgggaagaggatcaccgcgatcccgaggatcagcatggtatggctgaatatcgtcagccacggacggttctcaatcattggtaacgcaccttgctttcaacatagcggaactgcaccaccgtcagcacgatgacgaggaacatcaacaccaccgactgtgcggcagacgaagccagatccagtccggtaaaaccttcgcggtagatcttataaatcagcgtcgtggtggcctgaaccggcccgccggacgtggcggcgtcgatcaccgggaaggtgtcgaagaaggcatacaccaggttcactaccagcaggaagaaactcaccggggcgataagcggcagcgcaatcttaaagaagcggcgaatcggccctgcaccgtcgatggctgcggcttcgatcaacgaacggggaatggattgcagcgcggcatagaagaacaggaagttgtagctgatttgcttccatactgaggcaaacaccaccagaaacattgcctgaccgctgttttgcgcgtggttccagtcgtagccgaactccgcgagaaaatgggtgatcagcccgcgaccggggttaaacaggaagatccacaatacggcggcaacggcgggagccacggcgtaaggcagcaacattaaggtttgatagaaacggctgccgcgcacgatgtactccaccagcgccgcaaagaacagcgataccagcaaaccgctgacggtgacaaaggtgctgaattttatcgtcgtccagaaggagtcgagatagtagctgtcatggaacagcgtgacgaagttatccaggccgacaaactggctggagaaaccaaacggatcgacgctttgtagcgagtaccacaacgcttcgcccgcaggccagataaaaaagataacggtgatgatgagctgcggcgcgaccagcagataaggcagccagcgcgagcggaacaccggacgggatgatgacattacggttaattcctgaactgtgccggatgcgcttcgcttatccggcctacacgcgatgccaggtcagataagcgaaacgcatccgacattacactgattaagacttcgtcgatttctcaaagcggcgcagcaactgatttccacgctcaacggcggtatccagtgcctgctgtggtgtcttcttaccggtccacacgctctccagctcttcatccacaatcacgcggatctgcggcatgttgcccagacgcagccctttggtgaacggcaacggcggcttattcagcatctgacgcgtcgcggtatccgcccctgggtttttctcataaaagccctgctcacgggtcaggtcatacgctgctttggtgattggcagataaccggttttctgatgccactcggcagcgttttctggcttcgcgaggaaatcgaggaacttcgccacaccggtatacgtttctttatctttaccctgcatcacccacaggctggctccgccgataatggcgttttgtggcgcatctttcgcatcggcgtcgtaaggcatcatgcctacgccgtagttaaatttggcgtactcgcgaatgttggcaagagaaccggaagaggcggtggtcatcgcgcaatcaccgttatagaacttctcggtggattcatccttacgaccgacgtagctgaagtcgcccttcttgttcatctcctcgagcatggcgatgtgtttcacctgctccggcttgttgaactccagcaccgcgtccgtgccgtcaaagccgttgtttttgctggcaaacggcagaccgttccaggcgctaaagttttccagttggatccagccctgccagccgctggcgtagccgcacttcatgccggaggctttcagtttcgcggcatagtccgccagatcctgccaggttttcggcggctgttccgggtctaatcctgctttcttgaaggcgtctttgttgtaatagagaacgggggtcgagctgttgaatggctgggagagtaagtggcccgttttgctgtcggagtagtaacctgaaaccgtcggcacaaactgcgactcatcgaactgaatccctgcctctttaaacacgtcatacaccggtttaatggctttcgacgccatcatggtggcggtgccaacttcataaacctgcaaaatagccggcgcgttgccggtacgaaatgcggcaatccccgcgcttaaattctgttcgtagttgcctttataggtcggtacaattttgtaatccgggttttcggcgttaaaacgttgggccagagaatccacctctttacccagttccccttccatagaatgccagaacggaatggtcgtcactgcctgtgcattccccattaacgccagtccgagcgccagtgctgaagctgtataatgtaacggtttcatcgtttatctctcttgttgtaccgaatgcgcgaattcacgcgttttatgctcgcggggtaacatgacatgctcgaattacagaaaaataacttttttgttacatttgtaagatagtaaggtgtcagaaagatgacaaggcggtgacggcgtgggtgagggaaaatgggagatggggcacggataagcgggaaaatatagaaggtctgaatcaaactctacagattgctcatcgtttcatgccggatgcggcgtaaacgccttatcaggcctacaagatcgtgcaaattcaacatattgccactcacccagtaggcctgataagcgcagcgcatcaggcaattttacatttgtcacctgtctcaaaggagtcttttgactccctatcaatcaacgtgttattacccgcctaaatacgcacttctcaccgcttcattcgccagcagcgcatcaccagtatcggaaagcactacatggccgttttccagcacgtagccgcgatccgccagctttagcgcctggttggcgttctgctcgacgagaaagatagtcatcccctgctcgcgcagctgctcgatggtgtcgaaaatttgctggatgataatcggcgcaagaccgagcgatggctcatcaagcagtagcaaacgcgggttgctcatcagcgcacgaccaatcgccagcatctgctgttcaccgccggacatggtgcccgcccgctgaatacggcgctcatgcagacgtggaaacagctcatacacccactttatgcgctcctggaactggtcgcgttcagcaaaaaaaccgcccatcgccaggttctcttccaccgtcatccgcgagaagacgcgacgcccttccgggacaatcgccaccgcttcgcgcatgattttcgctgtctgccagtcggtaatgtctttatcatcaaacacaattcgcccgctggtggcacgcggatcgccgcataacgtgccgagcaaggtggttttccccgccccgttcgcgccaatcagcgtgacaatctcgccctgattgatatgcaggctcacctcatgcagcgcctggattttgccgtagtgggcgctgactttgtcaaaggacaacatgactttttccatcttatgcctcacctaaataggcacggatcacgtccgggttattacggatctgctccggcgtaccgtttgccagcggcgtcccctgattgaccacgtaaattcggtccgaaattcccatcaccagcttcatatcgtgttcaatcaacaagatagtggtgttgtgatgattgcgcagttcggcaatcagctcatccagctctttcgtctctttcgggttaagacctgccgcaggttcgtcgagcattaaaatctccggctgcgtcaccatgcagcgggcaatctcaagacggcgctggtcaccataggccaggttactcgcctgacggttggcgtgttccagcaaaccaatgcgctcaagccaggtcgcggcgcggtcgagcgcttcgctctgggcgcgacggaaggatggcgttttcaacaggccagagaacagcccggttttcagttgctgatgctgcgccaccagcaggttttcaattaccgtcatttcacggaacagacgcacatgctggaaggtgcgcaccacgcccatgcgggcaatttgctgccccggtaaaccttccaggtgctgatcgcgcagtaaaatggtgccgccggtgggtttgtagaatccggtcagacagttaaaaaccgtggtttttccggcaccgttagggccgattaacgagacgatctcctgcgggtacagttcaagattgacgttgttcaccgccagcaggccgccgaagcgcatcatcaggccgttaacagataataatggctgactcatgcctgctctcctttcgctgcgccgtttttcagcttcagttgcgggcgcgtcatgggcagcaagccctgcggacgccagatcatcatcagcaccatcaaaccaccgagcattaacatgctgtattcgttgaaatcacgcatcaactcgcgcgacaccaccagcaaaattgccgccagaatcaccgcaaattgcgagcccataccgccgagcaccactatcgccagcacaaacgccgattcggcaaaggtgaaggattccgggctgacaaagccctgacgcgccgcaaacagcgttccggcaaaaccggcaaacgcggcacttatggtaaaggcagtcagcttgatacgacgcgggcttaagcccagcgaacggcaggcgatttcatcttcacgcaacgcttcccacgcacgccccagcggcatccgcagcaggcggttaatgacaaacaggcttagcaccaccagcagcaacgccaccaggtagaggaagatgacacgatcggagggatcgtatttcaggccaaagaaattactgaacgtgtcccagccgccttcacgagcggtacggctgaactcgagtccgaagagtgtcggtttcgggatctgactgattccgttcgggccgccggtaatttcggtgttattgagcagcaatatgcgcacaatttcgccgaaaccgagggtaacgatcgccagatagtcaccgcgcaaacgcagcaccggaaaaccgagcaggaagcccgccgccgctgccattaatccagcaatcggcaggcaggtccagaagcccaagccgtaatagtgattgagcagcgcaaaagtgtaagcgccgatggcgtaaaaaccgccgtaccccagcaccagcagaccagaaagaccaacaaccacgttcagcccgagaccgaggataatgtagatcatggtcagggtggcaatatccaccgtcccgcgtgaaaccataaacggccacgccaccgcaagcaccaacagcgccacgaggaacagtttctgcttcaccgtggagccatcaatggcgggcagaataaacttcggtccggaaacgcttttcaaccctttctggaaagccggtcgcaaaagctggaagaaaaagaccaccgccgtgccgataaacacccactgccaacggacatccgaagccgtgtcgaccaccagtttggtgccatccagctccagttgcacgcccataaagacgcccgccagcacaaagaacatcgcggcagagagcagcgccattgcaatatgcatcggtttcatactttctctacctccgggcgacccagaataccggtcggcatcaccagcagcaccagaatcagcagggcgaatgagaccacatctttatattccgtactcagataggcagaagagagcgcctccgcaatccccagaatcaggccgccaatcatcgctcccggaatgctgccaatcccaccgagcaccgccgcggtaaaggctttcatcccggccataaagccgatgtaggggttaatgacgccgtagaactgaccgagcagcacacccgccaccgccgccatcgccgcgccaatcacaaaggtcagcgcaatcacccggtcggtgttaatgccaagcagactcgccattttcagatcttccgcgcaggcacgacacgcgcgacccatgcgggaatagcgaatgaaaatcgtcagcgccagcatggcgaggaaggtaacaatccagatcaccgcctgcatggtggtaatagaggcagagaagttttcgctatgccccaccacccactgaccgttaaacaggctcggcagcgccacgtcgcgcgaaccttcggtcaggctgacgtagttttgcaggaagatggacataccgattgcagagatgagtgcaatcaggcgcttagagttacgcaccgggcggtaagccacccgttcgatactccagccgtaggcgctggcaatgacgattgcgccgacgaatcccgcagctaccagcagccagccggtatcaatgcccatcatcatcagcgcggcgatgatcataaatgagacgtagctgccaatcatataaacctcgccgtgggcgaagttgatcatgccgataatgccgtaaaccatggtgtagccgatggctatcagcgcgtaggtactgcccagcgtgacgccgttaaacatctgctgcaagaaatacaaaaactgctcagacataaggtaacctttctaaacccgcccgcattttacgggcggtgggatgatcacttggctgccgtggatgaaccgtcggcgtgccactggaagacaccaaaatcaaatcccttaagatcgcctttttcatcccagttcagcggcccaatcacggtgtttgcaccgttagcttttaaatctttcaccagcgccagcggctcatcgctgccggtacgctcaagggcagtcgccagagattgcaccgccgcgtaggtgatccagacataaggcccggacggatctttcttgtctgctttcagcgcatcaacgatgccctggtttgccggatcctggtcatagcgttttggcatagtgaccaacatgccttcggcggcatcaccggcaatgttcgacaacgacgcattacccacaccttccggccccataaactgggttttcaggccaacggaacgggcctggcgcagcatctgccccatttccgggtagtaaccgccgtagtaaacgaagtcgatgttttcttttttcaggcgggcgatcagcgcggagaaatctttctccccggcggtaataccgtcgaagaagacgacgttggcgttagccgctttcagcccgtcctgcaccgaacgcgccagcccttcgccatactgttgtttgtcgtgaatgatggcgatgcgctggggcttcaccgtctcaagaatgtattttgccgccgttggcccctgggaagagtccagcccggcagtacgcataatgtgttgataaccgcgttgggtcagctccgggttggtcgctcccggcgagatcatcagaataccttcgtcttcatagatatctgacgcaggctgggtagaagaagaacacagatgaccaataacgtatttaatgccgtcattaacgattttgttggcgaccgcaacggcttgtttcgggtcgcatgcgtcgtcatattccacgccaaccagtttatcgcccttaattccccctttggcattaatgtctttaattgcctgacgcgcgccgttaaattccatatcgccccactgggcaatcgggccggacatcgcgccgacaacggcgactttaatatcgtcagccatagcggtgtgtgaaattgccagtgcaatcatccctgcgatgatagttttcgcattccgtttcatagtcaaaaatccccattcgtgatgttgtgttgctttgtttttatgtgttaacaaatcagactgttctttttttatactgcactgtttttgcctgtctgattaaggggttagcgcagtattttgtgataatagcgattaaaatccctatttttcagtcgattatgaacagataatattctgaatttattgatagataaacagaaaaaagtgcctttgtcagcataaaataacggcacaaagggcggaataattcactatcattcaggggattatgctggacatttttcattctctaatgttttaactttgtaattattgctgttaaaaaattaatcacctgccaaaagaaataaaaaagagaaagcctccgattaaattatttcgctacactggttccacttttgtgatttacacgggttacccatgaagctgaccatcattcgattagaaaaatttagcgaccaagaccggattgacctgcaaaagatctggccggagtattccccttcctcgttacaggttgacgataaccaccgtatctacgccgcgcgttttaacgagcgcctgctcgctgccgtgcgggtaaccttaagcggcaccgagggagcactggattccctgcgcgtgcgggaagtcacccgccgtcgcggtgtggggcaatatctgctggaagaggttttgcgtaacaatcctggcgtttcatgctggtggatggcggatgcaggcgtggaagatcgcggtgtgatgacggcgtttatgcaggcgctggggtttacggcacaacagggcggctgggagaagtgttaatcgtcaagtttgatttcaaaagtgatattgcctgatgcgctacgcttatcaggcctacaatgtgtgttgcaatttactgatttctttggatcttgtaggccggataaggcgtttacgccgcatccggcatgaagcaacgtactcgatattagcaatttggcggcaacccaaagttgccgattaatgattacttcgcatcggtcgccgtgccgttggcgtgccagtcaaatacgccgaactcaaagcctttcagatcgcctttctcatcccaggtcagcggtcccattacggtatccacggagttcgctttcaggtatttggcgatttcagccggatcgtcagactgattcaggcccgcctgcaaagattgcagcgcggcgtaggtggtccaaacgaatgcgccacttgggtcctgttttttcgctttgatcgcgtcaacaatgggtttgttcgccggaacctgatcgtagttcttcggcttggtcaccagcagcccttccgctgattcgcccgcaatgttagacagcgaaacgttagccacaccttccggccccataaactgagttttcagccctgccgcgcgtgcctgacgcaggatttgccccatttccgggtgataaccgccgtagtaaacgaagtcgatattctcttttttcagacgcgccaccagcgttgagaaatctttttccccggcggtgatgccatcaaagaacaccacgtttgcattgcctttcttcaggccgtcctgcaccgctcgcgccagaccttcgccgtattgctgtttgtcgtgaacgatagcaatacgctgcggtttcactttctcaagaatatatttcgccgccgtcggcccctggtcggagtccaggccggtggtgcgcaggatcagctgatagccacgggcggtcagctccggcgcggttgccgctggggtgatcattaaaatgccttcgtcttcgtagatgtcagacgcaggctgcgttgatgaagaacagaggtgaccaatcacatatttaatgccgtcgttaacgactttgttcgccaccgcaaccgcctgtttcgggtcacaggcatcgtcatattttacgatttgcagtttgttgcctttaatgccgcctttagcgttgatatccgcaaccgcctgctctgcgccggtaaactcctggtcaccgtactgcgcaaccggaccggacattgcgcccacgaccgcgactttaatatcttctgccagagccatattgctgaatgccagcgcgatacatcctgccagtaacgctttaccctttatgttcatcctgagaatccccattcttctggttattacgtgtgttgtgatgttgtttttcagcactttgtttcgttttatgcatgactacccgtgctttagcagcatactctgctaaaacatacccgatttttatgatattggaatagctattttgacagtttattaacaatctgcgtggggattggcgttttgccggaggggaaattgattattacagaggcccaaaaaacaaaaaccccggactctcatccagggttctctgcttaatagcggaaattacgcttcaatggcagcacgcaattttttcatcgcgttcttttccagctggcgtacacgctcagcggaaacgccgtaacggtcagccagttcctgcaacgtggacttgttgtcttcgtccagccagcgcgcacggatgatgtcctggctgcgttcgtccagaccctgcatcgcgtcggtcagacggtttgccgcctgctcttcccagttatcatcttcaatgccgtcggcaaagttagatgatttatcctgcagatagagcaccggagccatcggctggctgtcggaatcgtcgtcggaagacaggtcaaaggtcatgtcctgtgccgccatacgtgattccatctcacgtacgtctttgctggttacgcccagttcacgggccaccatttcgacttcatcctggttaaaccagcccagacgctgcttggttttacgcaggttgaagaacagtttgcgctgcgctttggtggtcgcaactttgacgatacgccagttacgcagaacgtattcgtggatctctgctttgatccagtgaacggcgaaggagaccaggcgcacacccacttccgggttgaaacggcgcactgctttcatcaggccgatgttaccttcctgaatcaaatccgcctgtggcaggccatagcccgcataattacgagcaatatgaacaacaaaccgcaggtgagacaggatcagcgttttagctgcttccagatcgccatggtaatgcagcttttcagccagcgcccgctcctcgtcagccgacaacatcggccacgcgttagctgcccggatgtaggaatccaggttgccaactggggctaaagctaaactttgcattttgtcagtcattcaaatcctctcaatcgatatcttctggcgcttcagtggtagcaacaactgtgccagagcttaagagcaacgaggttatcattcactgttttatcagaccgtgattttatccacaagttcaatgcaagcttgtgaataaattacgcacaaaatgtgacatagagatgaaataccgggaagagacaacggggtctctttccctgctacggaacccattgcagggaaagagtataacacgcttttattattcaggcgtaaagtggcgtaaatgttgtaccgtggcaagccacgctgccacccagccaatcatcgagcataccagcagcaatagcaggcattcatcgaatgataagccattgatatcaaacttcgttccgaaaacctgtgccacttccgcaaccgccgatgacaatcgcagcaccagaatttctgacaaaattaatgacaacaatgcgccagaaaatcccagcagtgcgccaccatacaggaacgggcgcaggatgaatccatctgtcgcaccaatcagtttctgtacgttaatggagtcacggcgagcaaagatactcagacgcacactgttaccgatgacgaggaacacggccgccaccatcaacacgccgatcatcgccgaaacgcgcccgaccagcccggtcaacgccgccagacgggcaaaccagctgtcatccatccgcacttcgtcaatgccgttaatctgcgtgatacgatcacgcagcgtattcagtgattccgtcccctggaaatcgagtttcgggatcaccaccgccactgccggaagcgggttttcttccagcatatccagcgcaccaccaaaaccagaccagttacggaactcacccagtgcgtcttcacgagaaagatagttcactttctccacgccttgctcggcctgcaactgtgccaccacgcccgcagcagcgtcatcgtccagcgttttttgcagataaacagtgatttgcggtgacggataatactgcgtcgccgcctggttaacgtttttgtacaccatataacagacgctgggcagcgtcagagaaatggcgataaccatcaccgttaaaaacgtggcgaacggtttgcttttcagatcctgcaatgcgccgtggaaggcatagcgcacctgttcgttgaaaacgttggttttgcgatttaccggttttggcgaggatttcgcgcgttttggtgcgttacgaccgccgtcgcctgagccgccgaccgatttacggaagcgatcaagacgcccgccaaactgccgaatatgattgattgcatcgcgcttattcatggcccacgcctccatgcaagtgaccatcgctcagggtgagcatgcgataggaacgccgcgagatcaggttgatgtcgtgcgttgccatcaatacggttaccccaacgcggttaaactcttcaaacagacgtaaaatgccttccgacagcgcgtcgtccaggttaccagtcggttcgtccgccagcagtaccgcgggcttgttcaccaccgcgcgggcaatgccaacacgctgttgttcaccgcccgaaagctgaatagggaagttcttcgctttgtccagtagcccgactttatccagcgccgccgacacccggcgacgaatatcgtcaccgctggcaccggcgataatcagcgggatcgccacgttatcgtagacagtacggtccatcagtagatggtgatcctggaaaatcatgccaatctggcggcgcagaaacggaacttcacggtttttcagacgcgtgatgtcatggccgctaaaccagattttcccggcgctgggccgctcaatcccacagatcagcttcaggagggtacttttccctgcgccggaatgaccggtcagaaacgccatctcacccggctgcatatggaacgtaacgccctgcagcgcctgtctcccaccgagataagccttgctgacatgttcaaagcgaatcattgttaatcctctcgggcaaaaagtgcctctataaagtcgtccgccttaaacggacgcaaatcctcaatacgttcgccgacaccaatgtagcggatagggataccaaactggtcagccaccgagaaaattaccccgcctttcgccgtgccgtccagtttcgttagcgtgatgccggttaagccaacggcttcatggaacagtttggcctggcttaccgcgttctgcccggtgctggcatcaatagtcagcataacttcatgcggcgcttcaacgtcgagtttcttcatcacgcggacgattttcttcaactcttccatcaggtgcgatttgttctgcaggcgtccggctgtatcggcaatcaggacgtcgatattacgcgctttagctgcctgaatggcgtcgaagataacagaggcggaatccgccccggtatgctgggcaatcaccggaatattgttgcgctgaccccagacctgaagctgttcaaccgcagctgcacggaaagtatcacccgccgccagcatcaccgatttaccctgctgctcaaactgacgcgccagcttaccaatcgtcgtggttttacccacaccgttgacgcccaccatcaggatcacaaacggcgctttgccttcaacattcagcggctcatcgactttcgccagaatctcgcccatctcttctttcagctggccatagagcgcctcggcgtcacgaagctgcttgcgggatgcgccttccgtcagattggtgataattttacgtgtggtttccacacccacatcggcgatcaaaagctgctcttccagctcctcaaacagatcatcgtcgatttttttaccgcggaacaggctgataaatccggaaccgagattttctttggtttttaacaggctgcgtttcaggcgcgcgaaaaaaccttctttggtcggtttttcctgctcctgagcgatttcttccaccggctgctcttcttctgccggaggaaccaccatcaccgcctcttctgccgcttcggcagccagcgccgtttccagctcttcgtcggtaatttcttctttagccgcttcttcttccgccgcttcgacaatctctacggtttccgcttcagcctgccactcttctggcgaaaccgcttcggcgttgacgtcttccggcaacggcagctcttcacgttcgatagccactggctccggcgtttcttctacgaccggttccggctgtgcaacgacttccgcttcaggctgcgctttttcactttcagcaacctgttcagtgacttccacaacgtcggcagcaaaagtttccgcctcggcttcagtatgcgcttgcggctgctcttcaacggcttgttcagaggccttcacaggctcttgcgcctgaacgatttcttctacaaccggttgttcattctgaacttctgtctctttttccggggtctgctctttttgaccaaagcccagccaggaaaaaaagccacgttttttttctttcgccatttgcgactacactcctcgctgttgcttcatggcacagcgttaacgctatgtacatagcagctaaaaaaatgatgaaatagtctatcacttaacttaattcacatcaccgcctgcaagtatgtgttatctggcggattgagcaatttatcatgaaaaaaccgaatcattccggcagcggccaaatccgcattattggcgggcagtggcgaggccgtaaactcccggttcctgatagcccaggtctgcgccccaccaccgaccgcgtacgcgaaacgttgtttaactggctggctccggtcattgttgacgcccaatgtctggattgcttcgccgggagcggcgcgctggggctggaagcgttatcgcgctacgctgcgggggcaacgttgattgagatggatcgcgcggtttctcagcagttaattaagaatctggcgacactaaaagcaggcaatgcacgcgtggtgaacagcaacgcgatgtcattcctggcgcaaaaaggtacaccgcataatatcgtgtttgtcgatccaccgttccgccgtggcttgttagaagagacgataaatttactggaagataacggctggctggctgacgaagccctgatttatgtcgaaagcgaagtcgaaaacggtctgcccactgttccagcaaactggtcattacatcgggaaaaagtggcgggtcaggtggcttatcggctgtatcaacgcgaagcacaaggagaaagtgatgctgattaatattggtcgtttgttaatgctctgcgtttggggatttttaatcctcaacctggtgcatcccttcccacgcccgctgaatatcttcgttaacgtggcgctgatttttaccgtgctgatgcatggtatgcagctggcgctattgaaatccactttaccgaaagatggcccgcagatgaccaccgccgaaaaggtacggattttccttttcggcgtgtttgaactgctggcctggcagaagaaatttaaagttaaaaaataaccttattgttcgcctacaaagctgacaaagcgcgttcctttatagctcagcgtacctttatcgcccactgtcagggcgtggtactgctgggcgtcgaggcgaaacgtctgctccattcctccgctttgcggtttgaagcttgcctcatagcgtatactggtgcctgccggagtcacttcctgctggcgcgaacggcgatcgttaatcggtttttcccgcttgttgctcaccaccaccagcttttgctggagcggagccatatcattatcagctttttcccgtcgctgttgcataaaacgaaacgatgcggcgacgacaattaagccaatgataacaataaagaaaagaggtggtttgctcatctttatccctcatcggaaaatgcggaaataagcataccctgccagttatggtgttgtcatccgtccaccctcgccactaaactggaagcaagaccgtaggcattccgcttacgaaaaaataacgaattcaaggaactaagatgctttggtcgtttatcgctgtctgtctttccgcatggctatctgtggatgcatcgtatcgtgggccaacctggcaacgctgggtgtttaaaccgttaacccttcttctcctgctgttactggcctggcaagcgccgatgttcgacgccattagctatctggtgctggcagggctgtgcgcctcactgctgggcgatgcgctaaccctgttgccacgtcaacgtctgatgtacgccatcggcgcgtttttcctctcgcacctgctgtacaccatctatttcgccagtcagatgacgctctctttcttctggcctctaccactggtgctgctggttctgggtgcgctgttactggcgattatctggacgcgcctggaagagtaccgttggcctatctgcacgtttatcggcatgacgctggtgatggtgtggctggcaggtgaactgtggttcttccgtccgaccgctccggcgctctctgcgtttgttggcgcttcgttgctgtttatcagtaactttgtctggctggggagccactatcgccgacgcttccgtgcggataacgcgattgctgcggcctgctactttgccggtcacttcctgatcgtccgctcgctgtatctctgataaaacttgactctggagtcgactccagagtgtatccttcggttaatgagaaaaaacttaaccggaggatgccatgtcgactcctgacaatcacggcaagaaagcccctcaatttgctgcgttcaaaccgctaaccacggtacagaacgccaacgactgttgctgcgacggcgcatgttccagcacgccaactctctctgaaaacgtctccggcacccgctatagctggaaagtcagcggcatggactgcgccgcctgtgcgcgcaaggtagaaaatgccgtgcgccagcttgcaggcgtgaatcaggtgcaggtgttgttcgccaccgaaaaactggtggtcgatgccgacaatgacattcgtgcacaagttgaatctgcgctgcaaaaagcaggctattccctgcgcgatgaacaggccgccgaagaaccgcaagcatcacgcctgaaagagaatctgccgctgattacgctaatcgtgatgatggcaatcagctggggtctggagcagttcaatcatccgttcgggcaactggcgtttatcgcgaccacgctggttgggctgtacccgattgctcgtcaggcattacggttgatcaaatccggcagctacttcgccattgaaaccttaatgagcgtagccgctattggtgcactgtttattggcgcaacggctgaagctgcgatggtgttgctgctgtttttgattggtgaacgactggaaggctgggccgccagccgcgcgcgtcagggcgttagcgcgttaatggcgctgaaaccagaaaccgccacgcgcctgcgtaagggtgagcgggaagaggtggcgattaacagcctgcgccctggcgatgtgattgaagtcgccgcaggtgggcgtttgcctgccgacggtaaactgctctcaccgtttgccagttttgatgaaagcgccctgaccggcgaatccattccggtggagcgcgcaacgggcgataaagtccctgctggtgccaccagcgtagaccgtctggtgacgttggaagtgctgtcagaaccgggagccagcgccattgaccggattctgaaactgatcgaagaagccgaagagcgtcgcgctcccattgagcggtttatcgaccgtttcagccgtatctatacgcccgcgattatggccgtcgctctgctggtgacgctggtgccaccgctgctgtttgccgccagctggcaggagtggatttataaagggctgacgctgctgctgattggctgcccgtgtgcgttagttatctcaacgcctgcggcgattacctccgggctggcggcggcagcgcgtcgtggggcgttgattaaaggcggagcggcgctggaacagctgggtcgtgttactcaggtggcgtttgataaaaccggtacgctgaccgtcggtaaaccgcgcgttaccgcgattcatccggcaacgggtattagtgaatctgaactgctgacactggcggcggcggtcgagcaaggcgcgacgcatccactggcgcaagccatcgtacgcgaagcacaggttgctgaactcgccattcccaccgccgaatcacagcgggcgctggtcgggtctggcattgaagcgcaggttaacggtgagcgcgtattgatttgcgctgccgggaaacatcccgctgatgcatttactggtttaattaacgaactggaaagcgccgggcaaacggtagtgctggtagtacgtaacgatgacgtgcttggtgtcattgcgttacaggataccctgcgcgccgatgctgcaactgccatcagtgaactgaacgcgctgggcgtcaaaggggtgatcctcaccggcgataatccacgcgcagcggcggcaattgccggggagctggggctggagtttaaagcgggcctgttgccggaagataaagtcaaagcggtgaccgggctgaatcaacatgcgccgctggcgatggtcggtgacggtattaacgacgcgccagcgatgaaagctgccgccatcgggattgcaatgggtagcggcacagacgtggcgctggaaaccgccgacgcagcattaacccataaccacctgcgcggcctggtgcaaatgattgaactggcacgcgccactcacgccaatatccgccagaacatcactattgcgctggggctgaaagggatcttcctcgtcaccacgctgttagggatgaccgggttgtggctggcagtgctggcagatacgggggcgacggtgctggtgacagcgaatgcgttaagattgttgcgcaggagataaggcaaaccgatcgcaacattgagcgcgatcggtcccctcgcccctctggggagagggttagggtgaggggaaaaggcggcatcgaagccaatcagcccctatcaaccgcctttacgaatcaaataacgataaggcagtccatccgtctctttagcaaccagttcgtgttccataaaggtacaaaacccaggaatatcgcgggtagtggccggatcgtcggcgataatcagcaacgtttcgccaggctgcatattgcgcacggttttgcgcaccatcatcaccggttccgggcagcgcaggccaagcgcgtcgagtgtgtggtcagggctggaaaagagatcggtcattttcttctcatcacttaaaaaaacggcgctagtttacgccctgtgagtccgtaagcaaactaggttaacgattgcgtgaaaattaaccattgcattgtcaacgtaaagcagtatcatgcggcggctcgaaaaaagggtaagcacgttattatgttaaggtaacagacgtgtcgtacgtattgggttccctcaccccaatggttaatcaaaaaggtacaatatgaacgttttctcgcaaactcaacgctataaggcgttgttctggttatcgttatttcatctgctggtgatcacctccagtaactatctggttcagcttcccgtctccattttgggtttccataccacctggggcgcgtttagctttccgtttatttttcttgctaccgacctgaccgtgcgtatttttggcgcaccgctggcccgacgcattatcttcgcggtaatgatccctgcgttattaatctcctacgtcatctcgtcgctattctatatgggttcctggcagggattcggcgcactcgcccacttcaacctgtttgtcgcccgtatcgccaccgccagtttcatggcctacgcgctggggcaaatcctcgacgtgcacgtttttaaccgcctgcgtcagagtcgccgctggtggctggcaccgacagcgtccacactgttcggtaacgtcagcgacacgctggcctttttcttcattgccttctggcgtagcccggatgcctttatggctgaacactggatggaaatcgcgctggtcgattactgtttcaaagtgttaatcagtatcgttttcttcctgccaatgtatggcgtattactcaatatgctgttgaaaagactggcagataaatccgaaatcaacgctttgcaggcgagttaaaggttcgttatcagagttgtgataagatggatgaatgagccgttatggccgtttatcgaaaggaagaagtcaatgcgcaatctggttaaatatgtcggaattggcctgctggttatggggcttgcggcctgtgatgataaagacactaacgctacggcgcagggttcggtcgcggaaagtaacgctaccgggaatcccgtcaacctgcttgatggcaagttaagtttctcgctgccagcggatatgaccgaccagagcggtaagctgggaacgcaggccaataacatgcatgtctggtccgacgccaccgggcagaaagcagtcatcgtcatcatgggcgatgatccgaaagaagatctggcggtgctggcgaagcgtctggaagatcagcaacgtagccgcgatccgcagctgcaagtggtaaccaataaagccattgagctgaaaggtcacaaaatgcagcagttagacagtattatctccgcgaaaggccagacggcgtactcttccgttattctgggtaacgtgggtaatcaactgctgaccatgcaaattacgctgcccgctgacgatcagcaaaaagcgcagaccaccgcagaaaacatcattaatacgctggttattcagtaagttttaagatgatgaggcggcctcagggacgtgttccggaggccgtttttttaatcgccacgtcagtaataacgcgattgcgaccagtcccgccgccgccagataaatcaccggtacgcccgcccagctcatcaccagcccagccagtggtccagtcacgccaagcgataaatccataaatacggtgtaagttgccagcgccgccccctgattttgctgcggaaccgcttttaccgccactacacccaatgccgggaacaccagcgaaaacccggcccccgccagtaagacgccgattttcgccatccacggcatagtcgccacgccaaccagtagcaggccgattatctcaacgctaaagcaaatcatcgctacgtttaagccaccgatacggttaatgccgttagggaataacaaacgcgtaccgacaaacgcacagctaaacagcgtcagcgcgaaagccgcaccgtcccaacctttagcgtcataaaacagcgtgataaaggtggcgatgacgccaaatccggcggaagccagtgccagcgccataccgtacagccagacgcgcccaagcaccgcgcgaaacggcagcggtttgcctttactggcttttaccgtcggacgcgggatcgccaacaaaatggccaccagcgccacgcccataatgattaacgctaacgcctgcaagccgccccagtgataaaacacgacgcctaacggcgcacccatcgccatcgccccgtaagtgacaatgccgttccacgaaatcacccgcccgatatgcagcgagccaaccacgccaacgccccatagggtcgatcccgttccggcaaaactttgcccaatcccaaggatgacgcgccccaggcaaagtaataacaggctgatgacaggcagactggcggttaatcctgccgtcagataccccagaccgctcaaaaagcagccgcataaaccgaagacgacaatctttttgggtcccagcgaatcggcgtaacgtccggcatgagggcggctcagcaaggtggcgaaatattgcaggctgataaccaatcctgcccagaaggcgctaaagcccatcacatcatggacatagcccggtaatacagcgagcggcaacccgatggtgaggtagctggcgaagttaaacatgactatagagacaatgcgcaaattcaggcgcaatccgtttagcgcgggttcggctacgggttcgggcatgaggatcaccacatttttacaacagtgtttcatttttaccacgtgctgacgtgaaaatcagcagtaagaatcagaatattgctggcgtgactcccgctacacttaatacaaaaagtcacaaggaagccccaatggaaacccctcaacccgataaaacgggcatgcacattctgctcaagctggcctcgctggtagtgatcctcgcgggcattcacgcagcggcagatatcattgtgcagctgttactggcgctgttttttgccatcgtcctcaacccgctcgtcacctggtttattcgtcggggagtacaacgccccgttgccattacgattgtagtggtggtgatgctgatcgcactaaccgcgctggtcggcgtactggcggcatcgtttaacgaatttatctctatgctgccgaagtttaataaggagctgacgcgcaaactttttaaattgcaggagatgttgccttttcttaatttgcatatgtcgccggagcgaatgctgcagcggatggactcggaaaaagtggttaccttcaccacagcgctaatgaccgggctttccggggcaatggcgagcgtgcttttgctggtgatgaccgtagtttttatgctgtttgaagtgcgccacgtcccttacaaaatgcgttttgcgctgaataatccacagattcacatcgcgggattacaccgcgcacttaaaggcgtttcgcactatcttgcattgaagacgctactcagtttatggacaggtgtcatcgtctggctggggctggagctgatgggggtgcagtttgcgctgatgtgggcagtactggcgtttttgctcaactacgtgcccaatatcggcgcggtaatttccgccgtaccgccaatgattcaggtgctgctgtttaatggtgtttacgaatgtattctggtcggcgcattgtttttagtggtccatatggtcatcggcaatattttagaaccacggatgatgggccatcgcctagggatgtccaccatggtggtatttctttcattgttaatttggggatggctgctcggcccggtagggatgctactttcggtgccattaaccagcgtgtgtaaaatctggatggaaaccaccaaaggcggtagcaaactggcgattttactggggccgggcagaccgaaaagtcggttaccgggatgaggcgacaagtgatacgatacgcactttcattttccattaaacgttggccctgatatgtatcggatagttctggggaaagtttcgaccttaagcgcagctccactgccaccgggtttacgcgagcaagcaccgcaaggtccacgacgcgaacgctggctggcggggcgtgcattgctttcgcacacgctttccccgctaccggagatcatctatggcgaacaaggcaaacctgcatttgcgccggaaatgccgctatggttcaacttaagccatagcggtgacgatatcgccctgctgttgagtgatgaaggcgaagtcggctgcgatatcgaagtgattcgcccgcgcgccaactggcgctggctggcgaacgccgtattcagcctcggggaacacgctgagatggacgccgtgcatcctgatcagcaactggaaatgttctggcgcatctggacgcgcaaagaagccatcgttaaacagcgtggcggcagcgcctggcaaatcgtcagcgtagacagcacctatcactcctcgctgtcagtcagccattgtcagcttgaaaatttaagccttgcgatctgcacccctactccctttacgctcaccgccgacagtgtgcaatggatcgattcagttaactgatccgcccacccgactgcccatctattgatccagaacaggtaatcagtatgacgaatacttaaaatcgtcatacttatttccgccatctattttaatccattggggttaccatgctctccacactccgccgcactctatttgcgctgctggcttgtgcgtcttttatcgtccatgccgctgcaccagatgaaatcaccaccgcctggccggtgaatgtcgggccactaaacccgcacctttacacgcctaaccagatgttcgcccagagcatggtttatgaaccattggtgaaatatcaggcagacggttcggtgatcccgtggctggcaaaaagctggactcattcagaagatggtaaaacctggaccttcaccctgcgtgatgacgtgaaattctccaacggtgaaccgttcgatgccgaggcggcggcagaaaacttccgcgcagtgctcgataaccgtcaacgtcacgcctggctggagctggcaaaccagattgttgatgttaaagcactcagtaaaacagagctgcaaattaccctgaaaagcgcctactatcctttcctgcaagaactggccctgccccgtcctttccgttttatcgctccctcgcagtttaaaaaccatgaaaccatgaacggaattaaagcgccgattggcaccggaccgtggattttgcaggaatcgaaactgaatcagtacgatgtcttcgtccgtaacgaaaactactggggcgaaaagccagcgattaaaaagatcacctttaacgtcatcccggacccgactacccgcgcggtggcgtttgaaactggcgatatcgacctgctgtacggaaacgaagggttattaccgctcgataccttcgcccgctttagccagaatccggcttaccacacccaactgtcacagccgatcgaaaccgtgatgctggcgctcaataccgccaaagcccccaccaacgagctggcagtacgtgaagctcttaattacgcggtaaacaaaaaatcgctgattgataacgcgttgtatggcacccagcaggtcgccgacaccctgtttgccccttctgtgccctacgccaacctcggcctgaaaccgagccagtacgatccgcaaaaagcgaaagcgttgctggaaaaagccggttggacgctgcctgcgggcaaagacatccgcgagaaaaatggtcagccgctgcgcattgaactttcgttcatcggcaccgatgcgttaagcaaatcgatggcggaaatcattcaggctgatatgcgccagattggcgcagatgtctcgctgattggcgaagaagagagcagtatctatgctcgtcagcgcgacggtcgttttggcatgattttccaccgcacctggggcgcgccatatgatccacacgccttcctcagttcaatgcgcgtaccgtcacacgctgacttccaggcacagcaaggattagccgacaaaccgctgattgataaagagatcggcgaagtgctggcgacccatgacgaaacgcaacgtcaggcgctgtatcgcgacattctgacccgtctgcatgacgaggcggtttatctgcctatcagttacatctcaatgatggtggtatcaaaaccggagctgggtaacatcccctacgcgccgatcgccaccgaaattccgttcgaacagattaaaccggtgaaaccttaatgttgcgttacgtattacgccgctttctgctgctgatcccgatggtgctcgccgcctcggtgatcatttttctgatgctgcgcctcggtaccggcgacccggcgctcgattatttgcgtctgtctaacctgccgccgacgccggagatgctggcctctacccgcaccatgctgggactggatcagccgctgtacgtccagtacggcacctggttgtggaaggcgctgcatcttgactttggtatctcattcgccagccaacgcccggtactggacgatatgctgaacttcctgcccgccacgctggaacttgcaggtgcggcgctggtattaattctgctcacttccgtaccgctcggtatctgggcggcgcgccatcgcgaccgtctgccggatttcgccgtacgtttcatcgcgtttcttggcgtgtcgatgcctaacttctggctggcgtttttactggtgatggcgttttcggtgtatctgcaatggctacccgcgatgggttacggcggctggcagcacatcattttgcctgcggtttccattgcctttatgtcgctggcgattaacgcgcgtttactgcgcgccagtatgctggacgtcgccggtcagcgtcacgtcacctgggcgcgtctgcgcggcctgaacgacaaacagaccgaacgtcgccacatcctgcgcaatgcctcgctgccgatgatcaccgccgtggggatgcatatcggcgaactgattggcgggacgatgattatcgaaaacatctttgcctggccgggcgtcgggcgctatgcggtgtcggcgatttttaaccgtgactatccggtgatccagtgctttacgctgatgatggtggtggtttttgtggtctgtaatttgattgtcgatttgctcaacgccgcgctggacccgcgcattcgtcgtcatgaaggagcgcacgcgtgaactttttcctctcttcccgctggtcggtacgcctggcgctgatcattatcgccctgctggcgctgattgcgctcaccagccagtggtggctgccgtatgacccccaggcgattgatttgccgtcgcgcctgctttcgccggatgcgcagcactggctgggcaccgatcacttaggtcgcgatattttctcgcggctgatggcagcgacccgcgtgtcgctcggttcggtaatggcctgcctgctgctggtgctgacattagggctggttattggcggcagcgccgggttgattggcgggcgcgttgatcaggccaccatgcgcgtcgccgatatgtttatgaccttcccgacctcgattctgtcgttctttatggttggcgtgctcggcaccgggctgaccaacgtaattatcgccatcgccctgtcgcactgggcgtggtatgcacgcatggtgcgcagcctggtgatttcactacgccaacgcgagtttgtgctggcgtcacggctttccggtgcgggccatgtgcgggtgtttgtcgatcatctggcaggcgcggtgatcccttcgctgctggtgctggcaacgctggatatcggccatatgatgctgcacgtcgcggggatgtctttccttggcctcggtgtgaccgcgccgaccgccgaatggggcgtgatgattaacgacgcgcgccagtatatctggacccagccgctgcaaatgttctggccggggctggcgctgtttatcagcgtgatggcctttaacctggtgggtgacgcactgcgcgatcatctggaccctcatctggtgacggagcacgcacactaatgccgcaacagattgaactacgtaatatcgcgctacaggccgcgcagccgctggtacacggtgtatcgttaaccctgcaacgcgggcgcgtgctggcgttagtcggcggtagcggcagcgggaaatcattaacctgcgccgcgacgctgggcattttgcccgctggcgttcgccagacggcgggggaaattttagccgatggcaaaccggtttcgccttgcgccctgcgcggcatcaaaattgccaccatcatgcagaacccgcgcagcgcctttaatccactgcacaccatgcacacccacgcgcgggaaacctgcctggcgttagggaaacccgccgatgacgctacgcttaccgctgccatagaagcggtggggctggaaaacgccgcgcgcgtgctgaagctgtacccgttcgagatgagcggcggcatgttgcagcgcatgatgattgcgatggcggtgctgtgtgaatcaccgtttatcatcgccgatgaaccgaccaccgaccttgacgtggtagcacaggcgcgcatcctcgatctgctggaaagcattatgcaaaaacaagcgccgggaatgctgctggtgacccatgatatgggcgttgtggcgcgtctggcggatgacgtggcggtgatgtctgacggtaagattgtcgaacagggcgatgtagaaacgctgtttaacgcccccaaacatacagtgacgcgcagcctggtttccgctcatctcgccctctacggtatggagctggcatcatgactttacttaacatctccggcctttcccatcactatgcgcacggtggatttaacggaaaacatcaacatcaggcggtgctgaataacgtttccctgaccctgaaaagcggcgaaaccgtcgccctgctggggcgcagcggctgcgggaaaagtaccctcgcgcggttgctggtgggtttagaatcgcccgcgcaggggaatattagctggcgtggcgaaccgctggcgaaactcaatcgcgcccagcgtaaagcgttccgccgcgatattcagatggtatttcaggactccatcagcgccgtgaatccgcgcaaaaccgtgcgcgagatcctgcgtgaaccgatgcgccacctgctatcactgaaaaaatccgaacaactggcgcgcgccagcgaaatgctgaaggcggtcgatctcgatgacagcgttctcgacaaacgcccaccgcagttaagcggcggccagctccagcgcgtctgcctggctcgcgcgctggcggtcgaaccgaaactactgattctggatgaagccgtttctaaccttgatctcgtgttacaggcgggtgtcattcgcctgctgaaaaagctacaacaacagtttggcaccgcctgcctgttcatcacccacgacttacgcctggtagaacgcttttgccagcgggtaatggttatggacaacggacaaatcgtcgaaacccaggtggtgggagagaaattaaccttttcctctgacgccggacgtgtgctacaaaacgcggtattacccgcattccccgtgcgccgtcgcaccacagaaaaggtttaacgcaaatgcaacgagtcaccatcacgcttgatgacgatttactggagacgctggacagcctgagccagcgtcgtggttataacaaccgttccgaagctatccgcgacattctgcgtagcgccctggcgcaagaggccacccagcagcacggcacgcaaggtttcgcggtgctgtcgtatgtgtatgaacacgaaaaacgcgacttagccagccgcattgtctccacccagcatcatcaccacgacctctccgtcgccacgctgcatgtgcacatcaaccacgacgactgtctggaaatcgccgtgttgaaaggtgacatgggtgacgtgcagcattttgccgatgacgttatcgcccagcgcggcgtgcggcacgggcatttgcagtgcttgccgaaggaagattgagtctattattgggtcctttggtgaacgatcaacaaagggccactagcacacctgattcctctctaaataccctatccgaaccttctcttttgtaacgttctaaatatattcctaaaaatcttcaattcattgtgaccacaagtttttcttcgctttttcgtatgaagatactgtcattaaaataatagaaaaggattttacgatgagcggaaaaccggcggcgcgtcagggtgacatgacgcagtatggcggtagcattgttcagggttcagccggggtacgcatcggtgcccccaccggcgtggcctgttcggtgtgccccggcggggtgacgtccggccatccggtcaatccgctgctcggtgcaaaggtccttcccggtgaaaccgacatcgccctgcccggcccgctgccgttcattctctcccgcacctacagcagttaccggacaaaaacgcccgcgccggtggggagcctcggccccggctggaaaatgcctgcggatatccgcttacagctgcgcgataacacactgatactcagtgataacggcggcagaagcctgtattttgagcacctgtttcccggtgaggacggttacagccgcagcgagtcactgtggctggtgcgcggcggcgtggcgaaactggatgaaggtcaccggctggccgcactctggcaggcgctgccggaagaactccgcttaagtccgcatcgttatctggcgacaaacagtccgcaggggccgtggtggctgctcggttggtgtgagcgggtgccggaagcggatgaggtgctgcctgcgccgctgccgccgtaccgggtactgaccgggctggtggaccgcttcgggcgcacacagacgttccaccgcgaagccgccggtgaattcagcggcgaaatcaccggcgtgacggatggtgcctggcgtcacttccggctggtactgaccacgcaggcgcagcgggcagaagaagcccggcagcaggccatttccggcgggacggaaccgtccgcttttcctgataccctgccgggttacaccgaatatggccgggacaacggcatccgtctgtctgccgtgtggctgacgcacgacccggaatacccggagaatttacctgccgcgccgctggtgcgctatggctggacgccacgcggcgaactggcggtggtgtatgaccgtagtggcaaacaggtgcgcagctttacttacgatgataaataccggggccggatggtggcgcaccgtcacacgggccggccggaaatccgttaccgttacgacagcgacgggcgggtgacagaacagctaaacccggcaggcttaagctacacgtatcagtatgagaaagaccgcatcaccatcaccgacagcctggaccgccgtgaagtgctgcacacgcagggcgaagccgggctgaagcgggtggtgaaaaaggaacacgcggacggcagcgtcacgcagagtcagtttgacgccgtgggcaggctcagggcacagacggatgccgcaggcaggacaacagagtacagcccggatgtggtgacgggcctcatcacgcgcataaccacgccggatggcagggcatcggcgttttactataaccaccacaaccagttaacgtcagccaccgggcctgacgggctggaattgcgccgggaatatgatgaattgggccgtctgattcaggaaactgcccctgacggcgatatcacccgctaccgttatgataatccacacagtgacttaccctgcgcaacggaagatgccaccggcagccggaaaaccatgacgtggagccgttacggtcagttgctgagcttcaccgactgttccggttatgtaacccgttatgaccatgaccgcttcgggcagatgacggcggtgcaccgcgaggaagggctgagtcagtaccgcgcatacgacagccgtggacagttaattgccgtgaaagacacgcagggccatgaaacgcggtatgaatacaacatcgccggtgacctgaccgccgtcattgccccggacggcagcagaaacgggacacagtacgatgcgtggggaaaggccgtccgtaccacgcagggcgggctgacgcgtagtatggaatacgatgctgccggacgggtcatccgcctgaccagtgaaaacggcagccacaccaccttccgttacgatgtacttgaccggctgatacaggaaaccggctttgacggccgcacacagcgttatcaccacgacctgaccggcaaacttatccgcagcgaggatgagggtctggtcacccactggcactatgacgaagcagaccgcctcacgcaccgcaccgtgaagggtgaaaccgcagagcggtggcagtatgacgaacgtggctggctgacagacatcagccatatcagcgaagggcaccgggtggcggtgcattacaggtatgatgagaaaggccggctgaccggtgagcgtcagacggtgcatcacccgcagacggaagcactgctctggcagcatgagaccagacatgcgtacaacgcgcaggggctggcgaaccgctgtataccggacagcctgcccgccgtggaatggctgacctacggcagcggttacctggcaggcatgaaactcggcgacacaccgctggtggagtacacccgcgaccgcctgcaccgggaaacgctgcgcagcttcggccgttatgaactcaccaccgcttatacccctgccgggcagttacagagccagcacctgaacagcctgctgtctgaccgcgattacacctggaacgacaacggcgaactcatccgcatcagcagcccgcgccagacccggagttacagctacagcaccaccggcaggctgaccggcgttcacaccaccgcagcgaatctggatatccgcatcccgtatgccacagacccggcaggtaaccgcctgcccgacccggagctgcacccggacagcaccctcagcatgtggccggataaccgtatcgcccgtgacgcgcactatctttaccggtatgaccgtcacggcaggctgacagagaaaaccgacctcatcccggaaggggttatccgcacggatgatgagcggactcaccggtaccattacgacagtcagcaccggctggtgcactacacgcggacacaatatgaagagccgctggtcgaaagtcgctatctttacgacccgctgggccgcagggtggcaaaacgggtgtggcggcgtgaacgggacctgacgggctggatgtcgctgtcacggaaaccgcaagtgacctggtacggctgggacggcgaccggctgaccacaatacagaacgacagaacccgcatccagacgatttatcagccggggagcttcacgccactcatcagagttgaaaccgccaccggtgagctggcgaaaacgcagcgccgcagcctggcggatgcgcttcagcagtccggcggcgaagacggtggcagtgtggtgttcccgccggtgctggtgcagatgctcgaccggctggaaagtgaaatcctggctgaccgggtgagtgaggaaagccgccgctggctggcatcgtgcggcctgaccgtggagcagatgcaaaaccagatggacccggtgtacacgccggcgcgaaaaatccacctgtaccactgcgaccatcgcggcctgccgctggcgctcatcagcacggaaggggcaacagcgtggtgcgcagaatatgatgaatggggcaacctgctgaatgaagagaacccgcatcagctgcagcagcttatccggctgccggggcagcagtatgatgaggagtccggcctgtattacaaccgccaccgctattatgacccgctgcaggggcgatatatcactcaggatccgattggactgaaggggggatggaacctgtatggatatcaattgaatccgatatcagacatcgaccccctgggtttatctatgtgggaggatgcaaaatcgggggcatgtactaatggtctttgcggcacactatccgctatgataggtccagataaatttgattctatagatagcaccgcatatggcgccttaaataaaataaatagccaatctatttgcgaagataaagagttcgctggtttaatatgtaaggataatagtggcagatatttctcaacagcacctaaccgaggagaaagaaaaggatcatatccattcaatagcccttgccctaatggtactgagaaagtatcagcttatcatactcatggtgcagatagtcatggagaatattgggacgaaatattttcaggtaaagatgagaaaatagttaaaagtaaagataacaatatcaagtcattttatttaggtacgcccagtggtaattttaaagcaatagataaccacgggaaggaaataacaaacagaaaaggattacctaatgtctgcagagttcatggtaatatgtaaaaaaaatattgtttaggaactgtgtcattgtatctttgtttgtttttacatacaacacatgggcgcagtgtaataataatattaaaataatgcgcaagtatgaaagtgaaggtaaatataccgttagaaatttggttaaaaataaagctatagcattggaattagctgagatatatgttaagaatcgttatggacaggatgccgcagaagaagaaaaaccatacgaaatcactgagttaacaacaagttgggttgttgaaggtaccattcactcagaccaaattgctggtggggtttttattatagaaataggcaaaaatgatgggagaattctgaattttggccacggaaaataagtatgtaaggataatcaaacatcgtgtgcgctgatggcagagtaggtggaggactccagacagtcaaacgatagaaaaagatagcctttatggaggttcctgcaatgtcaaatacataccagaaaagaaaggcaagtaaagagtatggtttatataataaatgtaagaaactaaatgatgatgaattatttcgcttacttgatgatcgcaattccttgaaaaggatttcatctgccagagtattacagttaagaggggggcaagacgctgttagattggcaattgaattctgcactgacaaaaattatatccgtagagatatcggagcatttatactcgggcaaatataaatttgcaaaaaatgcgaagataatgtttttaatattttgaacaatatggcattgaatgataagagtgcttgcgttcgagctacggcaatcgagtcaacggccagggaaagatcatcaaaagttcactttttgcactaaataattcgcattttatgtttaaaaattgagatattccttattacctgaagctgttttttattgcttatacatgatcaaatactccttacctaattaaggagaacaaaatggaacttaaaaaattgatggaacatatttctattatccccgattacagacaaacctggaaagtggaacataaattatcggatattctactgttgactatttgtgccgttatttctggtgcagaaggttgggaagatatagaggattttggggaaacacatctcgattttttgaagcaatatggtgattttgaaaatggtattcctgttcacgataccattgccagagttgtatcctgtatcagtcctgcaaaatttcacgagtgctttattaactggatgcgtgactgccattcttcagatgataaagacgtcattgcaattgatggaaaaacgctccggcactcttatgacaagagtcgccgcaggggagcgattcatgtcattagtgcgttctcaacaatgcacagtctggtcatcggacagatcaagacggatgagaaatctaatgagattacagctatcccagaacttcttaacatgctggatattaaaggaaaaatcatcacaactgatgcgatgggttgccagaaagatattgcagagaagatacaaaaacagggaggtgattatttattcgcggtaaaaggaacccaggggcggctaaataaagcctttgaggaaaaatttccgctgaaagaattaaataatccagagcatgacagttacgcaatcagtgaaaagagtcacggcagagaagaaatccgtcttcatattgtttgcgatgtccctgatgaacttattgatttcacgtttgaatggaaagggctgaagaaattatgcgtggcagtctcctttcggtccataatagcagaacaaaagaaagagccagaaatgacggtcagatattatatcagttctgctgatttaaccgctgagaaattcgccacagcgatccgaaatcactggcacgtggagaataagctgcactggcgtctggacgtggtaatgaatgaagacgactgcaaaataagaagaggaaatgcagcagaattattttcagggatacggcatattgctattaatattttgacgaatgataaggtattcaaggcagggttaagacgtaagatgcgaaaagcagccatggacagaaactatctggcgtcagtccttgcggggagcgggctttcgtaatcttgccctgaatacaggactgagtatcaaaaagccggttaactgaaactgtccaggttttgggggtcagttcataaacgccttatccggcctaaaaataactaaaattcaataaattgcaccgatgcgtagtccctataagcttacgcatcgggcaattgtatttacgccattgtcccaatcgtcttcctgaatcgcagcagcgcaatggtgaaaaatgcgccgccaattgccatcagcgtcagaaactgcggccagacgatttcgaatccggcaccccggtagaggatggcctgcgcgaggctaacaaagtgtgtcgtcggcatggtcagcataatgtcctgcaccatctgcggcatactttcgcgcggcgtggaaccaccggaaagcatttgcagcggcagcagcaccagaatcaccagcagccccagttgcggcattgaacgcgctatcgtccccataaaaatgccgattgacgtggtggcaaacagactgagcgccacgcccagcataaacagcgggatcgagccttcaatcggtacgcccagtacacctttcaccatcagcaccagcgataatcccgataccaccagcaccaccagccccatcgaccagatcttcgccatcatgatctcaaacggcgttatcggcatcaccagtaagtgttccaccgtgccgtgttcacgctcgcggatcagcgccgatccggtcaatacaatcgccagcatggtaatgttgttgatgatcgccatcaccccgccaaaccacgcgggatcgaggttcgggttaaagcgcatccgggtttccagcgataccaacggttcgctgttatcacggtagcgcgcgacaaagctgttcacttcaccgttgataatattctggatatacccattgccggtaaatgcctggctcatgcgcgtggcatcgacgttcacctgaatatccggctggcgtccggcgaggacatcacgctgaaaattaggcggaatatttatcgcgaaggtatagcgtccggcgtccagtccggcatccatctcatcggcggtgatcatctccggtggcaaaaaccacggacgatagaagctgttaacgatccggttcgataactgcgattgatccatatcggcaatggcgatcggcgcgaggttcaacgatcctggcgtaacggtcgctgacgaatacaccgacaccgtaaacgagaagacaatcagcgtcagcatcgctttatcaccgagcagactgcgcaactctttgatacccagattaaaaatattgcgtaaatggcgcatcatccctcctgttttttcagcagcaggatacttaagcccatcaccagcgggatggctatcagcaacgggataaaaagttgccacaaatcagtcagatccagcgctttcgagaacgtcccgcgggcgatagtcagaaaatgactggtcgggtaaacctcgccgatccaacgtccaggcccttccagcgaagctaccggatcgatcatcccggaaaactgtgtcgccgggatcaacgtgataatcgccgttccgaaaatggcggcaatctggcttttcataaaggtggagatcagcagccccattccggtggcaatgatgatatacagcagcgccgccagggtgagcgtcaggaaactgcctttatgcggtacgccaaacacaaacaccgacaggccgcagagcaggaaaaagttcagcatccccagcgcgatgtatggcaactgtttaccaagcaaaaattcactacgcgtggtgggggtcacgtaaaggttgataatcgacccaagctctttttcccgcaccacgctaagggcgcttagcattgacgggatcatcatcagcagaagcgggatcaccgccggaacaatcgctggcaggctttttacgtccgggttatagcgatagcgcgtctcaatattcatcagcccgctttggctggcgggtgtcgattgtcggctcgccacatcctgtaaccagctctggtgcatggcctgcacgtaaccttttaccgtttcagcacggctcggcatcgctccgtcgatccagacgccgagttccacaggcgtaccacgcgcgatatcgcgcccgaaattgggcgggatctcaatcgccaccgtgatatcgcccgcacgcatccgacgatcaagctcgtcataactggtgagcggcggctgttcgataaagtaacgggaaccggagaggttgagtgtccacgcctggctactgacggtctggtcgcggtcgagcaccgcaaagcgcaggttttccacatccatactgatgccgtaacccattatcagcatcaggatcaccgttcccatcagcgccagcgtcgaacgtactggatcgcgtcgcagttccagcgcttcgcggcggctgtagctaaacagacggcgcaggctaaatccctgacgcggcgcgtgggtggtgtcgtgtaccacgggcggcgcttcggcttcgttgctctgccctgccgcttcctgcaaataggcgataaatgcctcttccagactggcggctccgcgtttctcaaccagttcctgcggtgtaccgctggcaagcacttttccggcgtgcatcagtgagatgcggtcgcaacgttccgcttcgttcataaagtgggtggagatgaagatagtcactttgtcctggcgcgagagatcgaccatcaactgccagaacatatccctcgccaccggatcgacaccagaagtaggctcatcgaggattaacatctccgggcgatgaatcaccgccaccgccagcgaaagccgctggcgaatgccgagcggcaatgactccggcagaatatcttcaacgtcgttgagcttaaaacgctcgctcatttcagccactcttgcgggaatttccgcttccgggatgtgaaacaaacgggcatgtaactcaaggttttgccgcacggtgagttcgttatagagcgaaaacgcctgcgacatatagcccacccgacggcgggtatcgatatcttttggatcaaccggttgcccgaacagccacgcctcaccttcgctggcgggcagcagtccggtgagcattttcatggtggtggatttaccgcagccgttcgaaccaagaaaaccaaaaatctccccgcgtggaatgcggaaattaacgtgatcaacggcaacgaaggaaccaaaacgcatggtcagatcgcgcgcttcgatggcaatctctgcgttttcaggttgatacggtgggatcactaccgcctgatgcgcctggcgttgcgcttgcggtaacagatttataaatgcttcttccagcgtagcgctttgcgtttgctgccgtagctcttcggcgctgccagttgccagcacttctccggcattcatcgctaccagccagtcgaagcgttcggcctcttccatataggcggtggcgaccagcacgctcatattgctctgccgctggcgaatactgtcgatcagatcccagaactgggagcgggagagcgggtcaacccccgttgttggctcatcaaggatcaacagttccgggtcgtggattaacgcgcagcacagcccaagtttttgcttcatcccgccggagagtttccctgccggacgatcgcgaaacggtgctaacccggtgctggtcagcagctcattgattcgcacttcccgctccgctttgtcgtgaccgaacaggcgagcgaaaaaatcgacgttttcatacaccgacaaggtgtggtagaggtttttgcccagcccctgcggcatccaggcgatgcgcgggcagacgtcgcggcgatgcttcgggtcgcgcatatcgccgcccagcaccatcacattgccctgttcaatgacgcgggcaccggaaatcaacgacaacaagctcgacttcccgacgccgtccgggccaatcagcccgaccatacagcgggccggaatatcgagagtgatattgttcagcgcaacggtttttccataatgctggctcacgcccgccagttgcgcgacaggcgggacgggaaccagttccagatgcgtcattgcggcaacctcaccacgaggtcgtcaggccacggaagttcttcattcacccgcacccacgctacgcccggcaaaccggttttgacatattccagatgctgctggagtaattccggtgggatacgcgctttgacgcggaacatcagtttcagccgttcatcgctggtttcgacggtttttggcgtgaactgggcgacactggcgacaaaactgatggttgcaggaatacgcagatctggcgcggcatcgaggatcagccgggcttcaccgcccagtttcagcgtgcccgcctgttcggttggcaggaagaaagtcatatagacgtcgctgagatcgaccatattcagcacccgaccgcctgccgccagcacttcgcctggctcggcaacccgatactgcacgcgtccgtcacgcggggctttcagttcgctgtcatcgatatctgcggcaatgcgccgttcagtggcttgtgccgcttcgacgcgggtttgcgcctgaatgatattggtgcgtgccgcttctatagccgctttagaagccgatacctgagctttcgccgattccagcgcagctcgggcgctctcagcggcggcgcgatcgtcatccagctgttgcgcagaaatagcccctcgttgggccagtgaacgggaacgcgtatgacgttttgctacggagtccagttctgcctggcgttgattaaccagcgactgtgcggcacgagtttcgctttgtcgttgctccagcaaagcctgcgcggcagcaacggcgctttgtgcctctttgatttgcgcgatggcttccagtcgctgttcctgcaacacgcgagtatccatcttcgccagcacttcaccttcgcgaacaaactggccttctttcaccagaatggtgtcgatacgcccggcaattttgctggcaatatccacttccgtcgcttcaatgcgcccattactgacagcaaagccttccggcacacctgccgggcgcaacagccaccacgccacgatagccgccaccgcgagtaacccgacaacccaccacgccagatggcgcttactcttatccataatcgacccgccataatccctgtaagcaaacgacgcgtgttacaactgccgccgaacgacgttcagcggattcttccatccgggataagaaggaaacggcaaatacgaccagcgcgcagagcattgagcgccaacggggaaggcttagtgaaaacgggtagtaatgttgtcatcatcagcattcctggccgtaaatgaaacacgcatactcataagtgtgatctataaaactggctgacaaaacggtatccatcctgttggatagcgtttcacgcctgttcagttgcaggaacagagcattcctttttacgttttatcaacagtctcaaccagttagtaacattaatattcatgttgtctatggttcagagctgtaacattgtgcgccttctaatcaaaggcataagtccatttctgtttttttcatgctggtaagacttccagggagtggttatctcaggccctgcaccagggttaatttggcaattatgcatgctgaacattcttccagcatgtttactgtcacgggcgttaagacctaaaactgtccccgtttcgcctatgcgttctcttccaccatttccgttatgtgcaacaacttgatttatacctaacatttgtgaacatgctaatagtgcttcaagtttaggtctgtaatctgtcgaaacagaaaaataacgattaaaggatcgacaagagatagcccggctagttttaaactttttgccattaattatagcatgatgctttttattgataattgccgctaattcgaccggatcgagagcattggtcatttcatcaatagagactgttatcggtcctataatgtaacgttttcgctgatcatcaaaagttatcccatgatgatttgccattattttgtatttggggtcatagaaacatacaggataatcttttatcccagagtaggtatcctcatcgagtggtttcatacgcgtgaagttctgcatatagttaccattgcaattcgtttcatgatttccagctaatacatgaacattttcattgatactcattatgcgttttaacaaatcgatgataaattgatcaccacagatattgctaaatcgatcgccggtttggtcgcccagaaacgtacatggcgtcacagcgtctttattaataactaaataaggctgaagactttctaaaataatgtctcttctgttcaggatactgattattgtattaacattagtgttaagttgctcattaaagttctcccttagcaatacgttgagaacttcatcttctatattaagcaactggctaaggaaattttctccttcagccatgattcccaaatgtcccgttgcgaaaagcgcgaacaaaactgcaccgactgagccatcggtatcaccaaaataggttggtctggtacttgtgggatcaacgggtaaacaattggagaaatagattctgtcagcgaactggggttttatcattgtttcgaatttaatatcagatacattatattgcgatattttccagttccagatgggtttgtacgactcagtaactgcaacatcattagcattatcatttactgtcatattattaagtaaataaacaatactgcaccaattaacatcggtattatcaagagagcaaccgtaatttttgctattaattgtcacaataaactgataattattattcctacgtagaatatgagcacgcatgcccgatagcatactatatttttctgaatgatccgtttgtatggtaaatgaaattttgtcatcttgaatagattgttggaaccgttctatttgccaatcatctattttttccacaacctcaccgagcattgtcctggcaatacttgatatatcatcacctataccatttgcaatatacccaaacagttctttagtgaagttggtaacatgctcttgcaccatatcatttgttgcgattgtcgttgtactgtcgttagtgcctgccacagttccaattttcatattttacctcatattatttaccgcgaggaatacatagttaacattttatcttatgacatacacctcatgttcgatgggaaaataattatattttgcacaaatcattcagcctcaaagcataatatgaaatttcttatctcatagcagagaaagtccctaaagattgtagaggcgtcatcagaacatgcctctacaatcgattaagaaaacctatgaaatactggcaggattaaaaagacataccaccgtattcatggagttttaatgtggttgaaaacaactaagccctgaggaataaattattttattatttttatcacgtgcttccttcagggaatttagccccataataccattatcaaattgttgattatgatctaccccgggcccatgatgcccatatttttgtctaatgtatttgctggggtcttcacctttgagtgtctccccacatatgaagatacgttcacgtgctggtctgaaatcagtagtgttatcaaaataattagcatatacaggtgtgggtttcaaagtattgcttcggattagatggaatagaggatcatccatgtgttctttatgttttttattaaaaatattggctaattcctcaggatcagtaggatttttcatctgattaaatggaacctgcaaagcaccgagacaataacattttttttcttcatctcttattattccgtgatgactggttaaaacttgcctttctgagtcataattacaaacatcgagcgttttaattaagttatacgtatcaccggcagagagtttatgatttgctagtcgtgcagtatagttaccattaaaattgatttcatgatttccagccagaacgacgacatttttattaatacggctatctttattaccctccatatttcgcatagaatttagcaaagtaaggatatatttatcaccaaaaatagtactaaatctatcgcctgtatgatccccaaggaagatacaaggggttatcgcatcgtcctttaaaaaaacatgttgatgcaactcattcaagatcatgtctctcgtatttaataaatcgtagagcactttattatttttatgtttgtatgcagatgaagccatctcttcgtgttttaataattcacataataaactccaacccttttccctgatgcctatatgccctgaaacgagcaatgcataaagtacagcgcctactcttccatctgtatcgccaaaataagccgtgttggcattttgtggattaatcacaccacactgtttatagaagtctatttttgaaaacacagatttaacatagctatcaaacttttccttagtaaacgtctctttagagacatcccaacgccagtcaggtttgaaattaccactaagaagagtaaagaaatttctcgctatgatagaaagcccatcaactttataaattatatctgatttatctccagaggaattaataaaataataaccgcccttacactcaacagtaacggtaatgggagacgataattttaacacatggttattgtctggtataattgtaaagataaacgtatcagtagtattgtcggcgaatctattatattcttgaatatctatagaaggttcactattataaaaccatactttctccatctggtgactacgatcatttaccttccagtgaccatgttgcaggaaatagatgatatgcaggccaaaatcgttatctatttgcgaatcattatccagtttatcaaattcaactatctttgcacgatgtgttttatcaaccttgccatggtgttgatgactgttaactttatctgaatgcttatcttgatggcttgaagagatgtttctaatctgattgtcaattgctttcataaataacctgtgatatttttgaattgtttgtaacaaaataaatgatacttgtctgaaaaacagatttacgacgatataaaataataatacttatatgttcgctgattttaagcaccgagactatccggtcttttaccaaataatgaagaataatccctccctggaagataattgtaaaaaacaacagcataagaattaatcttaggataaatttttatttatcatggccttttgaacgctgaaaagtagcgctctgcaaagtaaaccccgctatagttatgctatgcatttgtctttaatgatatctcgtcattatattaacaggatgaaattatcattaatgcatatttcaatattagcagggatacctgaggagtttaaagtgaacatatatatcgggtggcttttcaaattaatccctttgattatgggcttaatttgtatcgcgttaggtggctttgtgctggaaagttcagggcaaagcgagtatttcgtcgcgggtcatgtgctgatttctctggcggccatatgcctggcattattcactaccgcatttattatcatttcgcagctcacgcgcggcgttaatacgttttacaatacattgttccccattattggctatgcggggtcaattatcaccatgatatggggttgggcactgttagcaggcaatgatgtgatggcagacgagtttgtcgccggccatgttattttcggcgttggtatgattgccgcctgtgtatcgacggtggcagcgtcatccggtcactttctgctcattcccaaaaatgcagcggggagcaagagcgacggaacaccggtacaggcttattcttcattaatcggtaactgcctcattgccgttcccgttttactcaccctgctcggtttcatttggtctattacgctgttacgtagtgctgacataactccgcattatgtcgcgggtcacgtattgcttgggttaaccgcaatctgtgcctgtctaattggccttgttgccacaattgtccatcaaacacgtaatacgttttcaactaaagaacactggctgtggtgttattgggttatttttctcggctcaatcacggtactgcaggggatatacgtcttagtcagttccgatgcaagcgcccgactggctcccggcattattcttatttgcctcggaatgatctgttacagcatattctcaaaagtctggctactggcactggtatggagacgtacctgttcgttagccaacagaataccgatgattcccgtcttcacctgcctgttttgccttttcctggcatcgtttcttgcggaaatggcgcagaccgacatgggatattttattccttcgcgagttctggtcggtttgggagcggtatgctttacgttgttctcaatcgtttcaatattagaagcgggttctgctaaaaaataattgcaacgtaccggataaaaccagcgttgaccatttgcgtaacgctggtttttcttaggcatcatgaaataacgcagcattaatgcatagtggttaagtataaaaaacagcaaagttactgtttttttcaacctgttcatatttcataaagatctggccactgggtgagttttcaatcacctttccatccaccttatattaagcatggagggtttcagttcacgggctcattagaaaataatcacaagataaccactatcaaaattagctcatttttaatgcgactctaataattttcatctttaggaaataggtcaggacgactttgctgcaatcaaatcctgcgcacaagcccacgcactcgaccacgcccactggaagttatagccccccagccagccggtgacgtccatcacttcgccgatgaagtacagcccaggcactttgcgcgcttccatcgtccgtgaagagagttcgttggtgtccacgccgccgagcgtcacttcggcagtgcgatagccttcagtgccgttgggttgtacgcgccagtcggtcaatgtgctaatcagtgcctgttggtcacgcacgttgagctgttttagcgaaacatccgggatttgcccgagttgctgtaagcgttcaaccaaccgcttcggtagatgaaccgccagtgtgtttttcaggctttgattcggatgtgcgttacgctgctcattcaggaaggtttcgaggtccacatccggtagcagattgatgctgacaaattcccccggttgccagtagcttgaaatctgcaacaccgccggtccagacaagccgcggtgggtgaagagtaagttctcacggaaaacggtgccgttttcagcggtaatcacggaaggcaccgccacgcccgccagcacctgtaactcttcgagcaacggtttatgcagagtgaatggcaccagacccgcgcgggtcggcagcacgttgaggccaaattgttcggcaatcttataaccaaacggcgacgcgcccagccccggcattgacagcccaccagtcgcgatgaccagcttttcgcaaccgacagtcatgccgttcagatcaagcgtgaagcctgtttcatccttcgccacactcagcacttcgctacgcaatctgaaggtcacattgcccttctcgcactcatccaccagcatgtcgacaatctgctgcgcggagtcatcgcagaagagttgccctaacgttttctcgtgccaggcgatgccgtgtttattgaccagatcaatgaaatcccactgggtaaaacgtgcgagtgcagacttacaaaaatgcggattctggctcagataagcgcctggttcgacataaaggttggtaaagttgcagcgcccaccgccagacataaggattttgcgccctggttttttaccattatcgatcagcagaacccggcgtcctgcctgacctgccagcgcagaacagaacatacccgccgcaccagcgcctataataatggcatcaaacctttccacgttgcgctcctcttagaaaaaacgggcgtgaattgtaaagattcctcagtggtcgcaccagcatcaatattactaaaaggaagtatttgcctgaattatataagataattattttttgagtgaaatccatacagggggcaaatcaaaaaaagtctatatttcactttgcccgcgccgcgaaagtcactgataatgcgccgcgttcatgtcctcaaaatggcgtaacgtcctatgctacatttgtttgctggcctggatttgcataccgggctgttattattgcttgcactggcttttgtgctgttctacgaagccatcaatggtttccatgacacagccaacgccgtggcaaccgttatctatacccgcgcgatgcgttctcagctcgccgtggttatggcggcggtattcaactttttgggtgttttgctgggtggtctgagtgttgcctatgccattgtgcatatgctgccgacggatctgctgcttaatatgggatcgtctcatggccttgccatggtgttctctatgttgctggcggcgattatctggaacctgggtacctggtactttggtttacctgcatccagctctcatacgctgattggcgcgatcatcgggattggtttaaccaatgcgttgatgaccgggacgtcagtggtggatgcactcaatatcccgaaagtattaagtattttcggttctctgatcgtttcccctattgtcggcctggtgtttgctggcggtctgattttcttgctgcgtcgctactggagcggcaccaagaaacgcgcccgtatccacctgaccccagcggagcgtgaaaagaaagacggcaagaaaaagccgccgttctggacgcgtattgcgctgatcctttccgctatcggcgtggcgttttcgcacggcgcgaacgatggtcagaaaggcattggtctggttatgttggtattgattggcgtcgcgccagcaggcttcgtggtgaacatgaatgccactggctacgaaatcacccgtacccgtgatgccatcaacaacgtcgaagcttactttgagcagcatcctgcgctgctcaaacaggctaccggtgctgatcagttagtaccggctccggaagctggcgcaacgcaacctgcggagttccactgccatccgtcgaataccattaacgcgctcaaccgcctgaaaggtatgttgaccaccgatgtggaaagctacgacaagctgtcgcttgatcaacgtagccagatgcgccgcattatgctgtgcgtttctgacactatcgacaaagtggtgaagatgcctggcgtgagtgctgacgatcagcgcctgttgaagaaactgaagtccgacatgcttagcaccatcgagtatgcaccggtgtggatcatcatggcggtcgcgctggcgttaggtatcggtacgatgattggctggcgccgtgtggcaacgactatcggtgagaaaatcggtaagaaaggcatgacctacgctcaggggatgtctgcccagatgacggcggcagtgtctatcggcctggcgagttataccgggatgccggtttccactactcacgtactctcctcttctgtcgcggggacgatggtggtagatggtggcggcttacagcgtaaaaccgtgaccagcattctgatggcctgggtgtttacccttccggctgcggtactgctttccggcgggctgtactggctctccttgcagttcctgtaatcgtacgcaccaaaacgagcgggtcagctggcccgcttcagattgtgacatagtgcgctttgttcatgccggatgcggcgtgaacgccttatccggcctacaaaaacatgcaaattcaatagattgcagagattatgtaggcctgataagcgtagcgcatcaggcaattttgcgtttgtaatcagtctcgagcgggtcagtttactggcccgctttttttatgcgttattattgctgaagtgcttaatgccaaatcatcaatgcaatcaggctgaccaccaccagaccacacaatgcgctggtcagaataaactgccgacgcacccgctcacagcggcgaataaattcatcatcgtgatgatcgcgataacgttgggcatagatataccaaacgagacgcacctgtttgttgggttggccatgtgaggtaaaaaagccccctccatcaacatattgatagagcaatggatcgcagttacgcagtaccactaacaacgcgcgtagtgatgagaaatagcgcgccatgttaacaatgcaaacgacacataaagcccaaaataatgcgacggtgcttatcatacctcctccccggcgacctgcccgcggagttccaccccggggctaccgctcccgatacgctgccaatcagttaacaccaggtcctggagaaaccgcttttgtggtgaccaacatacgagcggctctatagatagtgtaggagatcaggttgttttttttccagaaggttaaccactatcaatatattcatgtcgaaaatttgtttatctaacgagtaagcaaggcggattgacggatcatccgggtcgctataaggtaaggatggtcttaacactgaatctttacggctgggttagccccgcgcacgtagttcgcaggacgcgggtgacgtaacggcacaagaaacgctagctggccagtcatcgacaactttatggaaggagtaacactatggcttataaacacattctcatcgcggtcgacctctccccggaaagcaaagttctggtagagaaagcagtctctatggctcgcccctacaatgcgaaagtttctctgatccacgtagatgtaaactactctgacctatacaccgggcttattgatgtgaatctgggtgatatgcagaaacgcatctctgaagagacacatcatgcactgaccgagctttccactaatgcaggctacccaatcactgaaaccctgagcggcagcggcgacctgggccaggttctggtcgatgcaatcaagaaatacgatatggatttggtggtttgtggtcaccaccaggacttctggagcaaactgatgtcttccgcacgtcagctgatcaacaccgttcacgttgatatgctgattgttccgctgcgcgacgaagaagaataatcttccctctacgacgtgttcctgaacgcccgcatatgcgggcgttttgctttttggcgcgccttgttacctgatcagcgtaaacaccttatctggcctacggtctgcgtacgcaatcaaaatccccagccaatacaacatttaacaccatcatattttccatcattagtgtgatcatctggttattttctgttgtaatagtgtattaatctattcaccgcatcaatattaagaatctctgacagatgtaaactttttcgcgcgttatcccttacgcgttcatacttttcaggatggtattggaaggttaataaatatgaatacaacaacacccatggggatgctgcagcaacctcgcccatttttcatgatcttttttgtcgagttatgggagcgattcggctactacggcgtgcagggcgtactggcggttttcttcgttaaacagcttggattctcgcaagagcaggcttttgtcacttttggtgcttttgctgcgctggtctatggcctcatttccattggcggctatgtcggcgaccacctgctggggaccaaacgcaccattgttcttggagcacttgtgctggcgattggctacttcatgaccggcatgtcgctacttaagcctgacctgattttcatcgccctggggactatcgctgtcggtaacggcctgtttaaagctaacccagccagcttgctttcgaagtgctatccgccgaaagatccgcggcttgatggcgcattcaccctgttctatatgtcgatcaacatcggctcgttgatagcgttatcgctggcccctgtgatcgctgatagattcggttattcagtcacctacaacctgtgcggggcggggttaattatcgcattactggtttacatcgcctgtcgtggaatggtgaaagacattggttctgaacccgacttccggccaatgagcttcagcaaactgttgtacgtgttacttggcagcgtggtgatgatcttcgtatgcgcatggctgatgcacaacgtagaagtcgccaatctggtgctgattgttctctccatcgtcgtcaccatcatcttctttcgtcaggcattcaagctggataaaaccgggcgcaataaaatgtttgtcgcctttgtcctgatgctcgaagcggtggtgttttacattctctacgcccagatgccaacatcgctgaacttctttgccatcaacaacgtgcatcatgaaattctcggtttttccatcaacccggtcagcttccaggcgcttaacccgttctgggtggtactcgccagcccaatactggcaggcatttacacgcatctgggtaacaaaggcaaagacctctcgatgccgatgaaatttactctcggcatgtttatgtgctcactgggctttttgacggcggcagctgcgggaatgtggtttgcggatgcacaagggctgacatcgccatggtttatcgtgctggtgtacttattccagagcttaggtgaactgtttattagcgcccttggcctggcgatgattgctgccctggtgccgcagcatttgatgggctttattctcgggatgtggttcctgacgcaggctgccgcgttcttgctgggcggctatgtggcaacatttaccgcggtgccggacaacattaccgatccgcttgagacgttgcccgtctataccaacgtgtttggtaagattggtctggtcacgctgggcgttgcagtagtgatgctgttgatggtgccgtggctgaaacgcatgattgcgacgccggaaagccattaattattcttgcagaaagcagggtagcgttatcgctaccctgttttagttttacactggcgtacctgcatagatatcaaagcgatgccctttagtgactaccgcgtttggcgtggcgacattcgccagcggtggcgcgtagtccgggcgctttaccaccacgcgtttggtcgccagcaagcgtgcaggctccagtaatccatcggcatcaagatccggtcccaccagcgactgaaagacacgcatctcttttttcactagcgcgcttttctgcttatgcgggaacatcgggtcgagataaaccacctgcgggcgcggggtaatatcagtcagcgccgtcaggctggaggcgtgaattaactgcaaccgctcctgcaaccagccgccgatttccgcatccgcataaccacgcgccaggccgtcgtcgagtagcgcggcaaccactggattacgctccagcatccgcacgcggcagccgactgaagccagtacaaaggcatcgcgcccaagtcctgcagtggcatccaccacatccggcaaataatcgcctttaatgcccaccgctttcgccaccgcctcaccgcgaccaccgccgaatttgcgtcggtgcgccatcgctccgccaacaaaatcaacaaagatgccgccaagttttggctcatcacgcttgcgcaattccagatgttccggcgttaacaccagcgccatcaggttgtcttcatcgtgctccagcccccagcgggccgccagaacagataaggcaccgtctccggtgcctgtttcatcaattaagcagattttcactgaatgatcagcccttaatgccgtaatgctccagcatcgcatccagctgcggttcacgaccacggaagcgtttgaacagatccatcggctcttctgaaccgccacggctcagaatgttgtcgaggaacgactgcccggtttcacggttgaaaatgccctcttcctcaaagcgcgagaaagcatctgccgccagtacgtcagcccacaggtagctgtagtaacctgcggcataaccaccggcgaaaatatggctgaaagcgtgcgggaaacgcccccaggacggagatggcaccacggcaaccagtttcttgatttctgccagagtttcgaggatttttgccccctgatccgggcggaactcggcatgaaggcggaaatcaaacaggccgaactccagctgacgcagaataaacagcgccgcctggtagttcttcgccgccagcattttatccagcaactctttcggcagcggttcgccggtttcatagtgaccagagataaacgccagcgcctccggctcccagcaccagttttccataaactgactcggcagttcgaccgcatcccacggcacaccgctgataccggaaacaccagcggtttcgatgcgggtcagcatatggtgcaggccgtgaccgaactcgtggaagagggtgatcacttcgtcgtgagtgaacagcgccggtttaccatttaccgggcggttgaagttacaagtcaaatacgcgaccggtttttgcaaagaaccatcagctttacgcatctggcctacgcagtcatccatccacgccccgccgcgcttgttttcacgggcatacagatcgaggtagaagctaccgcgcagttcgttattttcgtcatacagttcgaagaaacgtacatccggatgccagacatcaacatctttacgctctttagcggtgatgccgtaaatacgcttaaccacttcaaacaggccgttaaccgctttgttttccgggaagtacggacgcagctgttcgtcactgatgctgtagaggtgctgtttttgtttttcgctgtagtaagcgatatcccacggctgcaactcatcgacgccaaattcggctttggcaaaggcacgcaattgcgccagctctttttcgccttgtggacgcgcgcgttttgccagatcggttaagaaatccagcacctgctgcgggttttctgccattttagtggcaagggatttaaaggcgtagttttcaaagcccagcagttgcgccagttcgtgacgcagcgcgaggatctcttccatcaccttgctgttatcccatttaccggcgtttgggccttgatcggaggcgcgggtgctgtaagcgcgatacatctcttcacgcagagcctggttgtcgcagtaggtcattaccggcaagtagcttgggatatccagcgtcagcaaataaccttccagctctttcgcttcggcctgggcttttgccgcagccagcgcgctttctggcatccccgccagctccgcttcgtcggtaacgagtttggtccagcccattgtcgcatcgaggacgttgttgctgtactggttgcccagttcagaaagacgggtcgcaatttcgccgtaacgctgctgtttctctttcggcagacctatgccagagagttcaaagtcgcgcagtgcgttatcaaccgctttcttctgcgccgtgttcagcgtggcgtaatgatcgccatcgcgcaggtcgcgatacgctttatacagcccttcatgttgccctacccaggtgctgtattccgacagcagcggcagggtttgttcgtaggcttcacgcagttccgggctatttttcaccgagttcaggtggctgaccggggagaagatacgccccaacacatcgtccacttccgccagcggctggcagagattttcccaggtgtacggtgccccttgcgctactacgcgctccacgttttcgcggcagtcgttcaatgccttagtcacggctggaacgacatgttccgggagaattttagaaaacggaggcaattcaaagggagtcagtaacggattcgtcattcgcgcagtcctggttaaagaggttaaggaagcgctcaacaggcgctttacataatgtgtgtagcatggggttaagtgtagtgaatttcaatgagaaacgttacgctttcgcggcggcggcctcttttcggtatactgtcctgatacgcttttgtgcgccccgaatacgggccgatttttacttaccggaacacctttacccatgctcagttatcgccacagctttcacgctggcaaccacgccgacgtccttaaacataccgttcagagcctgatcatcgagtcgctgaaagagaaagataaaccgtttctctatctcgacacccacgcaggggccgggcgttatcagttaggcagcgaacatgccgagcgtaccggcgaatatctcgaaggcatcgcccgtatctggcagcaggacgatttgcccgcagaactggaggcgtacatcaatgtggtaaaacacttcaaccgtagcggtcagttgcgttactaccccggttcgccgttgattgctcgcctgctactgcgtgaacaggacagcctgcaactgaccgaactgcacccgagcgattacccgttgttgcgttctgaatttcagaaagatagccgtgcgcgtgtcgaaaaagccgacggtttccagcagcttaaggccaaactgccgccggtttcccgccgtggtttaatccttatcgacccgccgtatgaaatgaaaactgactatcaagcggtggtcagcgggatagcagaaggttacaaacgtttcgccactggtatttacgcactgtggtatccggtggtgctgcgtcagcaaattaagcgcatgatccacgatctggaagcgaccggtattcgcaaaattctgcaaattgaactggcggtactgccagacagcgatcgccgtggcatgaccgcttccggcatgattgtgattaacccgccgtggaaactggaacaacagatgaataacgtgctgccgtggctgcacagcaaactggttccggcaggcaccgggcacgccaccgtaagctggatcgtgccggagtaattgcagccattgctggcacctattacgtctcgcgctacaatcgcggtaatcaacgataaggacactttgtcatgactaaacactatgattacatcgccatcggcggcggcagcggcggtatcgcctccatcaaccgcgcggctatgtacggccagaaatgtgcgctgattgaagccaaagagctgggcggcacctgcgtaaatgttggctgtgtgccgaaaaaagtgatgtggcacgcggcgcaaatccgtgaagcgatccatatgtacggcccggattatggttttgataccactatcaataaattcaactgggaaacgttgatcgccagccgtaccgcctatatcgaccgtattcatacttcctatgaaaacgtgctcggtaaaaataacgttgatgtaatcaaaggctttgcccgcttcgttgatgccaaaacgctggaggtaaacggcgaaaccatcacggccgatcatattctgatcgccacaggcggtcgtccgagccacccggatattccgggcgtggaatacggtattgattctgatggcttcttcgcccttcctgctttgccagagcgcgtggcggttgttggcgcgggttacatcgccgttgagctggcgggcgtgattaacggcctcggcgcgaaaacgcatctgtttgtgcgtaaacatgcgccgctgcgcagcttcgacccgatgatttccgaaacgctggtcgaagtgatgaacgccgaaggcccgcagctgcacaccaacgccatcccgaaagcggtagtgaaaaatgccgatggtagcctgacgctggagctggaagatggtcgcagtgaaacggtggattgcctgatttgggcgattggtcgcgagcctgccaatgacaacatcaacctggaagccgctggcgttaaaactaacgaaaaaggctatatcgtcgtcgataaatatcaaaacaccaatattgaaggtatttacgcggtgggcgataacacgggtgcagtggagctgacaccggtggcagttgcagcgggtcgccgtctctctgaacgcctgtttaataacaagccggatgagcatctggattacagcaacattccgaccgtggtcttcagccatccgccgattggtactgttggtttaacggaaccgcaggcgcgcgagcagtatggcgacgatcaggtgaaagtgtataaatcctctttcaccgcgatgtataccgccgtcaccactcaccgccagccgtgccgcatgaagctggtgtgcgttggatcggaagagaagattgtcggtattcacggcattggctttggtatggacgaaatgttgcagggcttcgcggtggcgctgaagatgggggcaaccaaaaaagacttcgacaataccgtcgccattcacccaacggcggcagaagagttcgtgacaatgcgttaaatgttaaagggctaagagtagtgtgctcttagcccttaattacgtttccgctatcagttcagaagctgaagcagaaagcggatcagttccagcagcgcaattaacgcccctagaacgatgattgctttatcaatcacccgttttctccatgcgatggagtgagaatgcatccgcttactcatccactgcctgtcacggcgcatgtctcattgttagataagaactctctcactccggccagagcatcagttaacggcaccacccgtacttctgaccaggactttgaaagcgtttatgcgcattgccagagtgaaaatgcctcagagctaactggataatcatacagtacatgcaggttataaaaccagcacgtccttgcaatagtttcagtatggtattagcattgatgcgttagatgatggctatctcactccagtcagagccaccaactcagggctggaaagtaaaaaaccgacgcaaagtcggtttttttacatccggattcggacaaggcttaatatgacgatgacccagtgaaagtatataaatcgtcactgcgatatataccgaagtgctccctccgccagctgaagaaatcgctaattcttgcaatgttagccactggctaatagtattgagctgttagataagaactctctcactccagccagagccaccaactcagggctggaaagtaaaaaaccgacgcaaagtcggtttttttacgtcctgattcagacctcctttcaaatgaatagccaactcaaaattcacacctattaccttcctctgcacttacacattcgttaagtcatatatgtttttgacttatccgcttcgaagagagacactacctgcaacaatcaggagcgcaatatgtcatttctgttacccatccaattgttcaaaattcttgctgatgaaacccgtctgggcatcgttttactgctcagcgaactgggagagttatgcgtctgcgatctctgcactgctctcgaccagtcgcagcccaagatctcccgccacctggcattgctgcgtgaaagcgggctattgctggaccgcaagcaaggtaagtgggttcattaccgcttatcaccgcatattccagcatgggcggcgaaaattattgatgaggcctggcgatgtgaacaggaaaaggttcaggcgattgtccgcaacctggctcgacaaaactgttccggggacagtaagaacatttgcagttaaaaatttagctaaacacatatgaattttcagatgtgttttatccgggaggcattatgttactggcaggcgctatctttgtcctgaccatcgtattggttatctggcagccgaaaggtttaggcatcggctggagtgcaacgctcggcgcagtactggcgttagttacgggcgtggtccatccgggtgatattccggtggtgtggaatatcgtctggaacgcgacggctgcgtttatcgccgtcattatcatcagcctgctgctggatgagtccggcttttttgaatgggcggcgctgcacgtctcacgctggggtaatggtcgtggtcgcttgctgtttacctggattgtcctgctcggtgctgccgttgccgccctgtttgccaatgatggcgcggcgcttattttgacaccgattgtcatcgccatgctgctggctttagggttcagtaaaggcactacgctggcgttcgtgatggcggccggattcattgccgataccgccagcctgccgcttattgtctccaacctggtgaatatcgtttccgctgatttctttggcctcggctttcgcgaatacgcctcggtgatggtgccggtggatatcgccgcgattgttgccacgctggtgatgttacatctctattttcgcaaagatattccgcagaactacgatatggcgctgctgaaatctcccgcagaagcgatcaaagatcctgctacgttcaaaactggctgggttgttttactgcttctgctggtgggatttttcgtcctggaaccgctcggcattccggtgagcgccattgcagctgtgggcgcgctgatattatttgtcgtcgctaaacgcggtcatgcgattaatacgggtaaagtcctgcgcggtgccccctggcagattgtcatcttctcgctcggcatgtatctggtggtttatggcctgcgcaatgccggattaacggaatatctttctggcgtactcaacgtgctggcggataacggcctgtgggccgcgacgctcggcaccggattcctcaccgccttcctctcttctattatgaacaatatgccgacggtactggttggcgcgttgtccattgatggcagcacggcatctggcgttatcaaagaagcgatggtttatgccaatgtgattggctgcgatttgggaccgaaaattaccccaattggtagcctggctacgctactctggctgcacgtactttcgcagaagaatatgactatcagctggggatattacttccgtacagggattatcatgaccctgcctgtgctgtttgtgacgctggctgcgctggcgctacgtctctctttcactttgtaatgagatactgatatgagcaacattaccatttatcacaacccggcctgcggcacgtcgcgtaatacgctggagatgatccgcaacagcggcacagaaccgaccattatccattatctggaaactccgccaacgcgcgatgaactggtcaaactcattgccgatatggggatttccgtacgcgcgctgctgcgtaaaaacgtcgaaccgtatgaggagctgggccttgcggaagataaatttactgacgatcggttaatcgactttatgcttcagcacccgattctgattaatcgcccgattgtggtgacgccgctgggaactcgcctgtgccgcccttcagaagtggtgctggaaattctgccagatgcgcaaaaaggcgcattctccaaggaagatggcgagaaagtggttgatgaagcgggtaagcgcctgaaataaagcggcgatatcccccccacaggttgttagaaaagtgcgctttatttatgtcggatgcgacgctggcgcgtcttatccgacctacaaagttatgaaaattcgatgaatagtatgttatttgtaggcctgacaggcgtagcgcatcaggcgattttgctatttacacagtactccctgcgtgagattccaattatcgcgtccagcatggtgtatcagtgagctgcttagttatcagcgatacagcgcagtagtttaaagacgtactggattatgatttatcagtggtttacacaacaaattattaaataattataagataccttaacccattttattattacacatctaaaacatcacaaaaaaaatcacttcacacactatcagagaacataataactttttaaaatgagcgcattttgatagttgttaacgatttcctttacgatactatcactaccctttttttacacacaaatattaccgggtggagataaaagggaaatcaaaggtaattatatcaggaagatataacgcattacatttattgtgtgtagaagaaaatccattcctgttctaattatccaatttaaacatcttagcataaaacaaatgatgaataaggaattttatgtcaattgactttaccccaggtataataaatacatatcacggcgatatttataactgcacaacaaataccgataatgctaaaacgccagacacaccgaagtggccttgcgataattgggaagaacaacaacccattaattccacattctctggagaaggatatatctctgatcaatatgatttagcgcaacaccaacttcaacaaattaatgcgtgccacacgaacactacatatacaaatgcagactactcaaaagttgtggctcaacttgtaagtcttattactaacattgaaacgataagttcgacacaacttacgcaacagacacaatcaatacttaatcagattaataacattagatatgaaaaaaacaaaagtgctgaatgtcgaatcattgttatcgctaatcctaaacccgacaaggcaatcataactaaaattagcgtagaagagggaatacccataacattcagtgtccaaaccatgttttcagatactaattttattgctgaacaacgagctgacttaccaactaatataaaagatattcaaagcctgtatcaaaaaatgacgaagttatatattgagcacagtgaaaataaaaacaggatgaaagtctttgccggaaccaactttattgatttcaatatgacaggacagaacctgtccgggttcgttctaaccttgtcaaggttttatttcgaagatctacttaatataaatttcactgacgcaaatttaggtgacactatttttttacataaagaacaccctacccccaaattatataaagatggacaatatcttgacaaacaaatcgaaggtttattttcaacattattaaccattaatgacaaccttttacgagcaaaagcggaaattgcttcgacaataattaaatttttagaggccaggataaccaatctttcatacaatgacatattaaaatatcagcaagaattccaaaaacaatgttataagcaagttaaagcctttacgacactctcccgatacaataaaattcaaacatgggcagaaatgtctgaatatcaattcgaagtatttcaatacgagacgcttaacccaaaaaaaatgtcacacacgccttatttaaagaggccactgcctaatgaaaaagatataaattatggggtggaaatagaaataccatctggtaaaagaattcgcttatcaaatcattaccagaatataataccataatattgattattagcactttataatcattgaataaaaatagattttatgtacttttaaaacaatgcactatattatggggtgatggatattcatgtcacgccccaaaattaactgagttcacctaaacagaaaggatataaacatcagacaggtttacgttactatcaggcatatcacctcagaatcagatgaaaactataaagaaatatctattatggttttaatatttgttgataaggatagtaacatgaacatgacaaaaggtgcactcatcctcagcctttcatttttgcttgccgcatgtagttcaattccgcaaaatatcaaaggcaataaccaacctgatattcaaaaaagttttgttgctgttcataaccagccggggttatatgttggtcaacaagcgcgctttggtgggaaggttatcaacgttatcaatggcaaaacggatacgttgttagaaatcgctgtattaccgttggatagctatgcgaagcctgatattgaagccaactatcagggccgactgctcgccagacaaagcggcttccttgatccagtgaactatcgtaatcactttgttaccatcctcggcaccattcagggtgaacaacctggctttatcaataaagtcccgtataacttcctggaagtgaatatgcagggcatccaggtgtggcatttgagagaagtggttaataccacctataacctgtgggattacggctatggtgcattctggccggaaccgggctggggtgcgccttactacaccaatgcggtgagtcaggtaacacctgagctggtcaaataacaccaccgaaagatgcagatgctttctcagcatctgcatcatgcattacatcaaattaatacacagtaagctaactattattattataagccctgtcctgttaattacctttggcaaactgattataaagttaatgtccgcaccaggagtcggttatgtttcttataattaccagggatacgatgttcttcaccgcgatgaaaaacattctgagtaaaggtaatgtcgttcatatacagaacgaagaagagatcgacgtaatgttgcatcagaatgccttcgtcattattgatacattaatgaataatgtatttcattctaattttctcactcaaattgaacgattaaaacctgtccatgtcattattttctccccctttaatattaaacgctgcctggggaaagtgccggtgacctttgttccgcggactatcactatcattgattttgtcgcactcatcaatggcagttactgctctgtgcctgaagcggctgtgtcactttcgcgcaagcaacatcaggttctgagctgcattgcgaatcaaatgacaacggaagatattctggagaaactgaaaatatcgctaaaaacgttctactgccataaacacaatatcatgatgatcctcaatcttaagcggatcaatgagctggtacgccatcagcatattgattatctggtgtgaatttcaggcttacggtgagtctggctacgctgccacacagattagctaattgaaacgcctttcacccctgccataccttttaataatcgcaacaggtcttctatcgacgttgtggcatgaagctggatatcaatggcgaccacttcatgatcttcattttcctgcaacgaaactaaatcagtttttattttttgctgcttaaaccagtcgagcattgataccgtattaccgttcactaatgtcagctgtaaatggtaatttttgttcatcaggcggaaggttaattgatggaagacttccagcaccaacaaggtcatcactgaaccataaatacccagttcgtacataccgctgccaataaccatacctatggcggcggtcacccagatatccgctgccgtcgtcagacctacaatattttggttacgaacgagaatgttacctgcaccgataaacccgacgcccgtcaccacctgagcagcaatacggctggggtcgagtccgacgtgatctaaagacagcacgtcagcaaaaccatatttcgaaacaatcataaacagggcgcttcccatgccaattaatacatgtgtgcgtaaccctgctcctttgccgcgcatttgcctttccatgccaatagcgccacaggcaattgccgcgagtataagacgtataataaattctgctgtcatataaaaatgcaaaaaggagcagcaagatggctcaacttgctactcctttttacttgcacctcattaattcggcaagtcattagatgcttgatttttgaaggtatacaaatttttctgcgggtttttcttacagtattcgatcactttaggaatttgagtgagatcggtttcatttaaagtaacggtatcgccacctttatatactgtttcttcatgcagcatccaccatgcaaccggggtcattgcttttggattcagatcaataaattcctggcaggtcatatctttagcggattcattggctgccagcgcagattgtgcgttcaccagtgacaaagccgctacagcgcccataaaaataaacgctttacggagagatgaaatattcattttgtaacccattcaatatagagattatatatgaacaggaggaatagctgcttttaaagaagatattccggcctgttcaatatgcaaggaagtacgatgtaacgcattcccggaattacatatctttcttaattttgtcccattcgcctttaactttatctttaaagttggcttgtttatcctgagtacaagcctgaacgatagctggggttacggttgcaataccctgaacatctaaaaccgcatcttctggtttatctttgttgttcagcgcttcagcaaaaccaactgcagttggctggaaggattcgtccacagccaggaaatcttcacaggtccaggagttgaccggttttttgttatcagctgctttttgcgcatccgctgcattgctcacaactggcagaagaagcagaccaccaagaataacgcctaatacttttttcatcgtaatatcctcaactataaagtgaaagagccgtcacgaatcaatttcgacactgaggttataacctggttttctgtatatgtcatgttgatggaaaatatcaaaatcagatatttttatttcaatacaatgagttacagatgcatcagatactgcaattaggaaatttttattaaatcgactgcattcttagacgcgtttttggcatagattgatagcaggggattttcttcttaattttatagggtggttctatgttatatatagataaggcaacaattttgaagtttgatctggagatgcttaaaaaacatcgcagagcaatccagtttattgccgtgctgctgtttatcgtcgggttgctgtgtatcagtttcccgttcgtctctggcgatattttaagcacagtagtgggtgcattattaatctgctcgggtattgcgcttattgtcgggttattcagcaaccgcagtcataatttctggccggtattatccggtttcctcgtcgcagtcgcctatttattgatcggctatttcttcatccgcgcaccggagctgggcatttttgccattgcggcatttattgccggtttgttctgtgttgcaggggttattcgcctgatgagttggtatcgtcagcgttcaatgaaaggcagctggctacagctcgttattggtgtgctggatatcgtcattgcctggatattccttggtgcaacgccgatggtgtctgtaacgctggtttccacactggtgggaattgaactgatatttagcgccaccagcctgttcagcttcgccagtttgttcgttaagcagcaataattaccccggttgtcacccggatcatagtcacttgatgtgactatgatccgattaatactctctccgctacgcagtgttgtagatcaattgcgcactatcattgaaataattacctgctagtgattatttcaacctactgaatttcatctaatttttttcactctatggcaaattagccatttcaaacattatcatggctgatattttccgtagtcaggtttaatgttttaaaagtgctgtgggaaagtgaacaaagagttccgtaagcgttgatgctatgggcggttaaataagtaatccgggttcatttttttgcaactggcgttgattacattgcataaatatccgtgtctccagacgctatataaaaacctgaagacatgaatgcgttatttactcaggtaatttcaatgcgttaaaagaaagctggcaatccaattgccagcttaagtcgaaacaaggagactcgatatttaaatcggattacattttaactttagtaatattcttcagagatcacaaactggttattgataacttattcttgggcagtaatccgcaaacgttaactttttgtttgctatttacaagctgataacaaccaggaatcttacttaggatcaatatatggagtgcgtgatggataaatctgaagtattgattagtgttaatagacgtattagttcacgaagggtaaagttcttataggcgtttactatattgaacaacgattcggacaaggatgtaaataatgaaaaggatgacatattcgaaacgataacggctaaggagcaagttatgatttttctcatgacgaaagattcttttcttttacagggcttttggcagttgaaagataatcacgaaatgataaaaatcaattccctgtcagagatcaaaaaagtaggcaataaacccttcaaggttatcattgatacctatcacaatcatatccttgatgaagaagcgattaaatttctggagaaattagatgccgagagaattattgttttggcaccttatcacatcagtaaactaaaagctaaagcgcctatttattttgttagccgcaaagaaagtatcaaaaatcttcttgagattacttatggtaaacacttgccccataagaattcacaattatgtttttcacataatcagttcaaaattatgcaactgattctgaaaaataaaaatgaaagcaatatcacgtcgacgctcaatatttcgcaacaaacattaaagattcagaaattcaacattatgtacaagctgaaactaagacgtatgagcgacatcgtcaccctgggtatcacatcttatttttagtcaggacataagcaactgaaattgatggctggcatgacgagggatgcagatgctgatttcattacccccggtgattactaaaggagaggctaaaacgactttattcccctggtatgtgtatccaccagtagaacccttcgttgcccgaatgctggcaggaactgttggcagaacggcaacattttttttgtcgttgacctcaccatgtcgatcactgtgcctgtatcccaccttactggctgacaaccccactatgccgctggtctgtaaatccctcatatctctcctcgcgcgcaatttaaagaaccgttatttctcaagaattttcagggactaaaatgaacagaagaagaaagctgttaataccgttgttattctgcggcgcgatgctcaccgcctgcgatgacaaatcggcggaaaacgccgccgccatgacgcctgaggtcggtgtcgtcacactctcccccggttcggtcaatgtgttgagcgaattgcccggtagaaccgttccttatgaagttgccgagatacgtccccaggtgggcggtattatcattaaacgcaactttatcgaaggcgataaagtgaaccagggcgattcgctgtatcagattgatcctgcacctttacaggccgagctaaactccgccaaaggctcgctggcgaaagcgctctctaccgccagcaatgcccgcatcacctttaaccgccaggcatcgttgctgaagaccaactacgttagccgtcaggattacgacaccgcgcgcacccagttgaatgaagcagaagccaatgtcaccgtcgccaaagcggctgttgaacaggcgacgatcaatctgcaatacgcgaatgtcacctcgccgattacgggcgtcagcgggaaatcgtcggtgaccgtcggcgcactcgttaccgctaatcaggcagattcgctggttaccgtacaacgtctggacccgatttatgtcgatctcacgcagtcggtgcaagatttcttacgcatgaaagaagaggtcgccagtgggcaaatcaaacaggttcagggcagtacgccagtacagctcaatctggaaaatggtaaacgctacagccagaccggcacgctgaaattctccgacccgacagtggatgaaaccacgggctccgtgacgttacgggcgattttccccaacccaaatggtgacttgctgcctggcatgtacgtcacggcattagtggatgaaggtagccgccagaatgtattactggtgccgcaggaaggcgtcacccacaacgcccagggtaaagcaacggcgctcattctggataaagacgatgtcgtgcagctacgcgaaattgaagccagcaaagccatcggcgaccagtgggtcgtcacctctggcttgcaggctggcgatcgggtgatcgtttccggtttgcaacgcattcgtccgggtatcaaagcacgagcaatttcctccagccaggaaaacgccagcaccgaatcgaaacaataacgttgcaggcttaaggggactttcatggctaactattttattgatcgcccggtttttgcctgggtacttgccattattatgatgcttgcaggtggtctggcgatcatgaacttaccggttgcgcagtatccgcagattgcgccaccgaccattaccgtcagcgctacctatccaggtgccgatgcgcaaacggtagaagactcggtcactcaggtgattgagcaaaatatgaatgggcttgatggcctgatgtacatgtcttcaaccagtgatgcggcgggcaatgcctctatcactctgaccttcgagactgggacatctcctgatatcgcacaggttcaagtgcaaaataaactgcaactcgctatgccttcattacctgaagcagtgcagcagcaggggattagcgtcgataagtcgagcagtaatatcctgatggtagcggcgtttatttctgataacggcagcctcaaccagtacgatatcgcggactatgtagcgtctaatatcaaagacccgctaagccgtaccgcgggcgttggtagcgtacaactctttggttccgagtatgccatgcgtatctggctggacccgcaaaaactcaataaatataacctggtaccttccgatgttatttcccagattaaggtgcaaaacaaccagatttccggtggtcaactgggtggcatgccacaggcggcagaccagcagctaaacgcctcgatcattgtgcagacgcgtctgcaaacgccggaagaatttggcaaaatcctgttgaaagttcagcaagatggttcgcaagtgctgctgcgtgatgtcgctcgcgtcgaacttggggcggaagattattccaccgtggcgcgctataacggcaaacctgctgccgggatcgccatcaaactggctgccggagcaaacgccctggatacctcgcgggcagtcaaagaggaactgaaccgcttatcagcctatttcccggcaagtctgaagacggtttatccttacgacaccacgccgtttatcgaaatttctattcaggaagttttcaaaacactggttgaggctatcatcctagtcttcctggtcatgtatctgtttttgcagaatttccgtgccacaatcatcccgacgattgccgtaccggtggttattctcgggacgtttgcgatcttgtcggcggtcggtttcaccatcaacacgttgactatgttcgggatggtgctggcgatagggttactggtggatgacgccatcgtggtggtggagaacgtcgagcgtgtcattgcggaagataagctaccgccgaaggaagcgacgcataaatcgatggggcagatccaacgtgcgctggtcggtattgccgttgttctttccgcagtgtttatgccgatggcctttatgagcggtgcaaccggggagatctaccgccagttctccatcacgctgatctcctccatgctgctttcagtatttgtggcaatgagcctgacccctgccctgtgcgccaccattctgaaagccgcgccggaaggcggtcacaaacctaacgccctgttcgcacgcttcaacacgctgtttgaaaaatcaactcaacactataccgatagcacccgctcgctgttgcgttgtaccggtcgctacatggtggtctacctgctgatttgcgccgggatggcggtgctgttcctgcgcacgccgacctctttcttaccagaagaggatcagggggtatttatgaccaccgcgcagttaccttccggtgccaccatggttaacaccacgaaagtgctgcaacaggtgacggattattatctgactaaagagaaagataatgtccagtcggtgtttaccgttggcggctttggcttcagcggtcaggggcaaaacaacggcctggcgtttatcagtctcaagccgtggtctgaacgtgtcggtgaggaaaactcggttaccgcgatcattcagcgggcaatgattgcgttaagcagtatcaataaagccgtcgtcttcccgttcaacttacccgcggtggctgaactgggtaccgcgtcaggttttgatatggaactgctggacaacggtaacctggggcacgaaaaactaacccaggcgcgaaacgagctgttatcactggcagcgcaatcaccgaatcaggtcaccggggtacgcccgaacggcctggaagatacgccgatgttcaaagtgaacgtcaacgctgcgaaagctgaagcgatgggcgtggcgctgtctgatatcaaccagacaatttccaccgccttcggcagcagctacgtgaacgacttcctcaaccaggggcgggtgaaaaaagtgtatgtccaggcaggcacgccgttccgtatgttgccggataacatcaaccaatggtatgtacgcaacgcctctggcacgatggcaccgctttctgcctactcgtctaccgaatggacctatggttcaccgcgactggaacgctacaacggcatcccgtcaatggagattttaggtgaagcggcggccgggaaaagtaccggtgacgccatgaaatttatggcagacctggtcgctaaacttccggcaggcgtcggctactcatggaccggactatcgtatcaggaagcgttatcctcaaatcaggctcctgcgctgtatgcgatttcactggtcgtggtgttcctcgccctcgccgcactctatgagagctggtcaattccgttctcggtgatgttggttgttccgttaggcgtcgttggcgcattactggccaccgatctgcgcggcttaagtaatgacgtctacttccaggttggtttgctgaccaccatcgggctttccgccaaaaacgccatcctgattgtcgaatttgccgttgagatgatgcagaaagaagggaaaacgccgatagaggcaatcatcgaagcggcgcggatgcgtttacgcccaatcctgatgacctctctggcctttattctcggcgtgctgccgctggttatcagtcatggtgccggttctggcgcgcaaaacgcggtaggtaccggcgtgatgggcgggatgtttgccgcaacagtgctggcaatttacttcgttccggtctttttcgttgtagtggaacatctctttgcccgctttaaaaaagcgtaacgtgtaaatgagagtaaggttgaacatgaaggttcagccttactctttcctgctaaccattcaccactcaacaaccagctaaccgtcaggaataccaggcttagtacacagcactgaaagtagaaaccactccagccattcgtcatcaatttgaacaacacaatactgacccacattcccgtaatcgtatgaattgtcagcttaataatcccaaacatgccgagtcttttcctcctgaaaataccgataccgcctggcaaactgcgaaagagaactagccggtagcccggcagaaatcatcagggaagagtttcacatgaagcaggtgtgagatcctgaccaatattcaaatgcgaaatatgtcaggaaaaggtacctggcgaatgttgcgcaaactgatgtggcgttacaccataatattgtcgaaatgtgtttataaagtacgatgtactgctatagccacatttttccgcaatagtatgcagaggaatttgacgtaactcgagtaatcgtctggccatcgacatcctggaggcgagtaatattttactgaaacaggtattttcatcctgcaacttttttttgattagactctcgctggtatacattctttccgcgatatcgcgcagataccaacgtttggcgatatcaaagctaataaggcgttcaacttttcctgaaacagtgctgatgctattgaaaagtaaggggatcagttctttcttatgagaaaacatcgataaacaggaaaggtagagcatattgctcagtatcggtgaatttaccccggattcattgaagctatcaaaaatcgccgtcaccagcggcatggggggtgactggttaattaacaaacggtctttgctgtgtaaccctaaattgcgtggtagctgacgaatattttgtaagtaatggcaaactgtcagctcatcgatatccagtcgtcgcgtatccggtgaacaaaacgcaaaatcgtctgccaaatttttctccagcagcagaatactctcgttatgcagcgatattttttgctgttcatgataaatatcgaatgaacgacgaatgaggatcaccgagcagacatgagtcatgattatcccttatatttcatactgcgattatttcaatttcagtatactaatgaaatgatgccagactgtttcttagcgcaaaaactgccagatttggtaggaccaaaatttatccacaaagtagttttgcataacagttaattgataataagtaaatgcagcacgaatatattttcgcacagcgtatagcttatgtttataaaaaaatggctgatcttatttccagtaaaagttatatttaacttactgagagcacaaagtttcccgtgccaacagggagtgttataacggtttattagtctggagacggcagactatcctcttcccggtcccctatgccgggttttttttatgtctgagtaaaactctataatcttattccttccgcagaacggtcagtgccgtaaaaattcccttgcgcaacaatacttgccgccgagtcacggttcgacaatctctgcgccgatcgctcctgatactctgtgggcgtcatcccataataatttcgaaagacgtaaatgaaatacgacacgctgtgatatccacaggatactgcaactcgcttaattgaaaaaccatgtataacaataagttgcaaagcacgttgcattctacactcagtaagcaactgtgaatatgatgtctcttcttcgcgcaattttttctttaacagacttggactcatcaacagctcgctggcgattcgggctagtgtccactcatgggcgatattattattgataaccgtacaaactcgtgttcgcatgttcggttgtaaaacgttcagaagcagcggtataaagtgctcatcctcaagaaaaacagataacaacgcacagattaatgctcttttacgtagcatttctgcatagcgaagattcttattctgcgatagttgcgcaacttcctgaaaaacaggaatatctctactacagtgatgaacgagtaatgaagaaacttttttatgtgcatgaagatttaatgcctcctccttgagcatcgggagaaataatgaaagcgtgtcccttgacacgaatacaaaattttcaacacacttatctactcgaatttggcttgcatccgcaaaaaccaggtcaccgccattaaaatagcgatattcaccattaaccatggtgagaatatatttatgtcttgcatacgcaattagacaattcccatgtagtgattgcatagttgacttaatattacataaacatattactgtttattaatgtagcacgccgccctcttaagtcaaattgattgataaataaatttaaacgaagcgggagaacaggatgataatgtgtgatgttctacgggcaggatgactggatttataatacaaaaacgtgtttaagaacgcagggaaattaatagtaagcaaataatcccttttcgtgacattaaaggtaatcgctacatttaataaacattcatataacatatatcttatcaacacgatgaatagacagccaatatattattgcgattaataagcaaccgaatgcccagctgtttttttaaaggctgggcattcggtttttacaacgttatgttatcaggtgtgtttaaagctgttctgctgggcaataccctgcagtttcgggtgatcgctgagatatttcagggaggctttgtagtcttccagcaacagttcagcaaagtccatttcgaagccgcgacgacacataatgcgcatcaccacgatgtcggtggcttcaccgccgagagtgaaggccggaacctgccagccgcgcagacgcagacgttcagagaggtcgtacagggtgtatcccggatcttcaccatctttcagtttgaagcaaaccgccgggatgccttcgtccgggcgacccgtacagatgaactcatacggccccagtttggcgatttcatccgccagataagcggcaacctggtaagaggcgttctgtactttggtatagccttcacgaccgaggcgcaggaattcatagtactgtgcaattacctgacccgccgggcgggagaagttgatggcaaaagtaccaatttgaccacccaggtagtcaacgttgaacaccagttcctgcggcagcgcttcttcgtcacgccagataacccagccgcagcccagcggagccagaccgaatttatggcctgaagcactgatcgatttcacacgcggcaggcggaagtcccagacgatatccggggcgacgaacggtgccaggaagccaccgctggcagcgtcgatgtgcatgtcgatgtcgataccggtgtcggcctggaatttatccagcgcatcgtgcagcggttgtgggaactcatagttaccggtgtaggtcacgccgaaagtcggcaccacgccgatggtgttttcgtcacaggcttcaatcatgcgtttcgggtccataaacaactgaccggggcgcatagggatctcacgcagctccacatcccagtagcgggcgaatttatgccagcagatttgtaccggaccgcacaccaggtttggtttatccgttggtttgcctgcagcttccatacgcttgcgccaacgccatttcatcgccatcccgccgagcatacaggcctcggaagaaccaatggtgttggtgccaacggcctgaccatttttcggcgcaggcgcatgccacagatcggcaaccatatttacgcaacgcaggtcgatggctgcggattgcggatattcttctttgtcgatccagtttttattgatcgacaaatccatcaatttatggacgttttcgtcgtcccaggtctggcagaaagtggccaggttctgacgagcgttgccatcaagatataattcatcattgataatctgaaatgcgacatcatcgcgcatttcgtgcagcggaaatcgttttgactccgcgatagtagaaatggcctttgcgccaaaacgtgaatcgagtagttctgagcggaaatccgttaacagcttctggtccatttcgaactccttaaatttatttgaaggcaataaaaaagtaggatttatccgcaatggaagcaaggcattacaggcttaatttaaataacaaaatcctaagcagaaaaacgactttttataatataaacatttaacatgataatattaaaaacagactttattatcgtaataaaaatcgcccaaacattgctgttcgggcgatcaaattaattattgtttatcctgcatatacggcgtgtacaccccgttcagactgtgcaggaaagctacgatatcatccacatcctcctgcggcagctctttgcctacctgatagcgcagcatcagtttcaccgccccgtccagcgtcggcacgtcaccgcgatggaagtacggtgccgttaaagcaacgttacgtaaaccgggtactttctgacgcaatttatcacgctcttctttagtcacattcatacgaccaatatccgccgccgtaatttccccaaagttaaagtcttttttcagccccaacggttcaaaggaacgtccgccgagaataataccaccatgacaagttgcacatttattatctttaaataattgatagccttttttctgttgcgccgtcagcgcattttcatctccgcgcaaccatttatcaaatggggaatccggcgtaattaatgttttctcaaattcagcaatggcatcagtaatattttcgccactgaaaccttgcggatagacttcgaggaactgcgttttaagctgcggatctttttccagcttagcaataatttcgtcccaggatttcgacgccatttcaatcgggttcaacggcggtccaccagcctgatcctgcaatgttgccgcacgaccatcccagaactgctcaacgttaaatactgagttaaataccgtcggcgcgttaatcggcccaactgcgccaccaacaccaatcgatgtttttctgccatcgacgccccccgcattcaacgcatggcaatgagcgcatgaaatggtgctatcagccgataaacggggatcgtgatacagcgcaaaacccaacgccactttttgcgcatcggtaggcagtttttgcgggatgggctgcaccggttcattgcgatgttccggagcagtatcattgctggcgtaatattccgcgcgctgttttgcaatccaggccagtatttccgcccgctcttcatcactcaccttacccgcccagtgtagcgcggtataacgcgttggtggcatagtttcatactgcatcacccattcaatcttattcaaatcgctttgcgaaacgggtttatcagccagcagtgccgcacgcacggcctcaaggttaaaagatttatatccaagcttaatgtcgtaatccatcaactgtttcgcgccaggaatataataataggcgggtaattctgccgaaggcgtgtggcaatagtcgcatcctttttcgcggagaaagcctaaaaccttattattttcactgacagcagatgcctgaacatcggcctgtttactgcgtttattatcgtggtaccacacataaccagataaccctaaatagcaaatcgcgacgccagccaggccgatcgcggtaatacgtgagaccattttcattattcttccctcacggtggtgagttattgtgacccagaaaattttccagaatgctgcaaacgtctctgcgagacaaagccatcataaaaaacagggagatacgctttttgataggaatcaatcaattacatgaatataaactatcaataagatagcctgtgcctattacccagatcaggaatggcatatcatgattgcggcgagagcaggattgaatgttctgaaaatgaaaaacaacaccaaatcggtatttttataaattccattgatattagtgcgttatattttttgacaggttaataaacgtgatccaccgcacgctttgtcgcccaccaggcggagcgaatgactacccttaaagaaaagccgataattagcgacgaatttcggaggttggatccttatgctcaatcagaaaattcaaaaccctaatccagacgaactgatgatcgaagtcgatctctgctatgagctggacccgtatgaattaaaactggatgagatgatcgaggcagaaccggaacccgagatgattgaagggctgcctgcctctgatgcgctgacgcctgccgatcgctatctcgaactgttcgagcatgttcagtcggcgaaaattttccccgacagtaaaacctttcccgactgcgcacctaaaatggacccgctggatatcttaatccgctaccgtaaagtgcgccgtcatcgtgattttgacttgcgcaagtttgttgaaaaccacttctggctgccggaggtctactccagcgagtatgtatcggacccgcaaaattccctgaaagagcatatcgaccagctgtggccggtgctaacccgcgaaccacaggatcacattccgtggtcttctctgctggcgctgccgcagtcatatattgtcccgggcggccgttttagcgaaacctactattgggattcctatttcaccatgctggggctggcggaaagtggtcgggaagatttgctgaaatgcatggccgataacttcgcctggatgatcgaaaactacggtcacatccccaacggcaaccgcacctattatttgagccgctcgcaaccaccggtttttgcgctgatggtggagttgtttgaagaagatggtgtacgcggtgcgcgccgctatctcgaccaccttaaaatggaatatgccttctggatggacggtgcagaatcgttaatccctaatcaggcctatcgccatgttgtgcggatgccggacggatcgctgctcaaccgttactgggacgatcgcgacacgccgcgtgacgaatcctggcttgaggacgttgaaaccgcgaaacattctggtcgcccgcccaacgaggtgtaccgcgatttacgcgcgggggcggcctccggttgggattactcttcccgttggctgcgtgatactggtcgtctggcgagcattcgtaccacccagttcatccccatcgatctgaatgccttcctgtttaaactggagagcgccatcgccaacatctcggcgctgaaaggcgagaaagagacagaagcactgttccgccagaaagccagtgcccgtcgcgatgcggtaaaccgttacctctgggatgatgaaaacggcatctaccgcgattacgactggcgacgcgaacaactggcgctgttttccgctgccgccattgtgccactctatgtcggtatggcgaaccatgaacaggccgatcgtctggcaaacgccgtgcgcagtcggttactgacacctggcgggattctggcaagcgagtacgaaaccggtgaacagtgggataaacccaacggctgggcaccgttacaatggatggcgattcagggatttaaaatgtacggcgatgaccttctgggtgatgaaatcgcgcgaagctggctgaagacggtgaatcagttctatctggaacagcacaaactgatcgaaaaataccatattgccgatggtgttccccgcgaaggcggcggtggcgagtatccgttgcaggatgggtttggctggactaacggtgtggtacgccgtttaattggtttgtacggcgaaccataatatttttacagccagccgctaacttcctgctggctgtaaaattatcctcttcaggaggagatatttaacatcattgccgcctgggtgcgatttttcacttccagacggcgatacagggattccagatgcgcttttaccgttccggtactgatattcagcgctctgccgatctccttatttgattcgcccgccgctaacatggttaaaatctcccgctggcgggcgcttaacgatttgagatctttaatgtccttttccggcgtcgtccgccagtctccaggcagaaacatcatccccatcgccgcactatttaccgccaacgcaaatgtctcgacggttgaatcacgaggcacaatggccagcacattaaaatggataacttcctgtaaccaccgtttattgcaatccgtcgccgtaattaacaccttaacctcaggaaattgcaccacggttttttgcagcaaccagtagcaaaactcaccatcctgatcgccatcgagcataactaaggcttcagggtaactttccagcttttgccataactcgtctgcctgactggccccctgaatactcactcctggaatacgctgctgtaaactgattttcattccatgaataaatattgactgcctgtcaaacatgactatttgcataactgaatctccacctgaatacgttaaaaagacttaagtagtggaagggtattacccgcgagaaaaaataagaattcgccatttggcggtggccattctacagagatgacgtgtagaaaatagttaccgatataaatagttacagctaaacgcctgaaattacatgtcgagggcactatttaaaacaattttgaggatttccttatattggtggttagtacgcatgcaattaaaaatgaaattccgcgaccacaagccaaaataacaaacggcaaggagacaaaaataagcacaaatagccaacacgtcctctgttcactttaaagggaatcgctgaaaaatacgctctgtttaaggggattcacctttctcagaaagctattccgcccttttcctgctgagaaatcgccacattcggcatgacaacattgtgaaacccggcattagatgttagaaaaaacaataaacaatgcgatatgcgcgttactgtttcgctgtgaacaacaatcggtcaaagaaatggataaaattcacgcaatgcagttgttcatcaaagtcgcggagctggaaagtttttcccgcgcagcggatttctttgctttgccaaagggaagtgtttcgcgccagatacaggcactggaacatcaacttggcacccagcttctccagcgcaccacgcgacgggtcaaactcacgccagaaggcatgacctattatcaacgagcaaaagatgtgttgagtaatctcagcgaactggacggtctgtttcaacaggatgccaccagtatcagcggtaaattacgcatcgacatcccgccaggaatcgcgaaaagcctgttactgccgcgcctgtcggaatttctctatctgcatccgggaattgagctggaactgagtagccatgaccgtccggtagatattcttcatgatggttttgattgcgtgatacgcactggcgcgttaccggaagatggcgttatcgcccgtcccctcggcaaactgaccatggtcaactgtgccagtccgcactatctgacgcgctttggttatccgcaaagccccgatgatctgacttcacacgcaatagtgcgttatacaccgcacctgggtgtacatccgttaggttttgaggttgccagcgttaatggcgtccagtggtttaagtctggcggcatgttgacggtaaacagtagcgaaaactatctcaccgccggtcttgccggtctggggattattcagatcccgcgcattgccgtgcgcgaagccctgcgtgccgggcggcttattgaagtattacctggctaccgtgccgagccgctctccctttcgctggtttatccgcagcgtcgggagctttcccggcgtgtaaacctgtttatgcagtggctggctggcgtaatgaaagagtacctggactgaccgactatactttttaagaatgaccacgacagaaggacaaaagagcggatgacgcaggaaaacgagatcaaacgtcccatccaggatctggagcacgagccgattaagccgttggataatagcgagaaaggcagcaaagttagccaggcgctggaaaccgtcaccaccactgccgaaaaagtccaacgccaaccggttattgcgcacctgattcgcgcgacagaacgctttaacgatcggctgggtaaccagtttggtgcggctatcacctatttctcatttttgtcgatgataccaattttgatggtgtcgtttgccgcagggggctttgtgctggcctcccatccgatgttgctacaggatatcttcgacaaaattctgcaaaacatcagcgatccgacgctagccgccacgttgaaaaacaccatcaacaccgccgttcagcagcgtacgactgtagggcttgtcggcctggcggtggcactttattccggcatcaactggatgggtaacctgcgtgaagcgattcgtgcccagtcgcgcgatgtctgggaacgctcgccgcaagatcaggagaagttctgggtaaaatatctgcgagattttatttcgctgattggtttgttgattgcgctgattgtgacgctttcgatcacctcggttgccggttcggcgcagcaaatgattattagcgccctgcacctgaacagcattgagtggctgaaaccgacgtggcgattgattggcctggcgatttccatcttcgccaactatctgcttttcttctggatcttctggcggttgccgcgccaccgtccgcgcaaaaaagccctgattcgcggaacatttctggctgctattggttttgaagtgattaaaatcgtgatgacctacaccctgccatcgttgatgaaatccccctctggcgcagcatttggttccgtgctggggctgatggcatttttctacttcttcgcccgtttgacgctgttttgcgcggcgtggattgccaccgccgaatataaagacgacccgcgaatgccggggaaaacgcagccttaaaataggccggatgcggcgtaaacgccttatccggcatacgattttattcggcctggctccccgtaggccggataagatgcgccagcatcgcatccggctataatgcgcacataacctcttgaaactcgtccccagagcctcttcagccatctatttgggagcaaacaatttcattccaactcataaccccagcatataaatccagttggtaacttttatttaacctgaaaccagttttatccactatttataaaattatgtgaagcatttcatagaagaaaaatcactggcctaaacattatcccctttttgcctgatttttgaccatttccgcgatttgttacacattgaaatatcacttttgctgtgcgtaatatggctattcgttagccaaaaaataagaaaagattatgcaagcaacagccacaacactcgaccacgagcaagaatacacgccgatcaactcgcgtaataaagtccttgtcgcctctctcattggcacagccattgagttcttcgacttttacatttacgccactgcggccgttattgtgtttccgcatatcttcttcccgcagggcgatcctacggcagcaacgctacagtcgctcgccaccttcgccatcgccttcgtcgcgcgccccattggctctgccgtttttggtcattttggcgatcgcgttgggcgtaaagcgacgctggtcgcctcgttgctaacgatggggatttcgaccgtggtgattggtctgctgccgggctatgccacgattggtattttcgccccgctgctgctggcgctggctcgatttggtcagggtctgggcttaggcggtgaatggggcggcgcggcgctgctggcgactgaaaacgccccaccgcgcaaacgtgcactgtatggctcctttccgcagctgggcgcaccgattggcttcttctttgccaatggcactttcttgctgctttcctggctactgaccgacgagcagtttatgagctggggctggcgtgtgccatttatcttctcggcggtgctggtcattatcggcctgtatgttcgcgtgtcgctgcatgagtcgccggtgtttgagaaagtcgctaaagcgaaaaaacaggtgaagatcccgctgggtacgctgctgaccaaacatgttcgcgtaaccgtactgggtacgttcattatgctggcaacctatacgctgttttacatcatgacggtctactctatgacctttagtaccgccgccgcgccagttgggcttggcctgccgcgtaacgaagtgttgtggatgttgatgatggcagttattggttttggcgtgatggtgccagtcgctggattactggctgatgcctttggtcgccgtaaaagcatggtaatcatcaccacgctgatcatcctgttcgcgctgttcgcctttaacccactgctcggttctggcaacccgattctggtttttgccttcctgctgctggggttaagtctgatgggtctgaccttcgggccaatgggtgcgctgttaccagagctgtttccgacagaagtgcgttacaccggagcatcgttctcttacaacgtagcgtcgattctcggggcttccgttgcgccatatatcgcagcctggttgcagactaactacgggctaggtgcggtggggttatatctggcggcgatggctggcttgacgttaatcgccctgctgctgacccatgagacgcgacatcagtcgttgtaataagagtgaaaagcctgatgcgctacgcttatcaggcctgaatttccatacaatatattgaattcgcaaggatttgtaggccggataaggcgttcacgccgcatccggcatgaacaaagcacactttgccaacaatctaaatctgtttaattgccggatgtcagacatccggcaattatcatcacttcttcatctgcgacaaaatcgtccgacactgattagcctccccttcggaaggtgagatcagtgccagtaacgccgccgccggtgttaccagcgttgccagtgccgcagcaacagcaccacgggcaatcagcggtccggctttcaccccagcctgcggatttttaaacgtcccccgcacatacagcggcgaacgcagtgtgataatccgaattcctttactctccggatcaatagtcaaatccagctgttccgaagcaaaacttgccgtgccggtaacattaatcaacgcgttctcagtatcgaaagcaaaaatctgcgggcgcgccacgccgttggcaatattcagattcgccgccgcgcagttcacccgcacctcatcatcaccaaatatcgcaccgacaatgtagttgccgacattcagcccaacaatctccatcaggttgcggctcaccagcccgtcattcatcaacagtttcaggttgccgttactgttgcctaaaagtgccgccaccgagttaccgctaccgcgtagttccgcgtcaccgttcatttcccccagcgtcttctgcatcagttccacatcgggcatcagttctttcagtttcagtcgacgagcctgaatatctgcccgcccctgcatcggctttttatcgccttccagatgaatattcgccgcaatgctgccgcccgccatgccaaatttcagcggttgcaggcgcaggtcagcatttttgaggatgatatgagtagaaagatcgctaatcggcaggctactgccatgctcaatgcgccgccctttgaagcgaacatcggcatccataacgtcccatttatcggtttcgaagcggtcataaggcagcactttgcccgcaggctgaacgcttttttcgcccttcttctgttcagaccgtttcgacttttctgcccctttcccggaatcaacgccaatcaacggtcccaggtccgccagccgcaattgccgcgactcgacatcaccttccagttttggtcgtggctttccggtggtgtagaccagagaaccgtggatatcgctatcaccaattcgcccattaaaaccgcgataatcaaagaccgacgatttttcagtgtcgattttcgctaccagccgaccatccgtttcaaacggcggagtatcgggcagcagaacgcccgtcagttcatagagatcacccagtgaatcgccagaaaatttaagccgtaaatcgacaccgcccatcttcattgggtcattcacgacgccatcaaaagcaacacgggtgttaccagagcggaaatcagcctgtaccggaaacggcgtcccttcgccacgcagcgccagcataccgcctatttttcccgtacccgtgagcggttcaccgttatatcgtccctgcgccttcaggccaaaaacgtaatcgcccaccttttctttatccgctttacctttcgatccagtaacttcgctgaacggcagcggcttgcctaagggatcaacaaaaatctccagatccgctttgcttactttgtcatcaatggcgatccgcccttgatcgaaaagaatattatccagccgaaacgaccatgccgacggctttgcattcgcgtctttgttatcatcgttggcaagattaaacgtccagttattgttcttttcagagaggcgaatcaggcgcgcgtcgggcttttcgagcttgatccacggcagccagaccgttttggtcagcagcgccagcggggccagcgttgcctctacgcgtggcaaatgcaccatcgtgacttcgggaatatccggtggattgccaagaatgatgtcttccgcgtgtacatggggccacggcacccagctgcgccagccagtttcttgtttttgccgctcccacaccacgcccagatcgccacggatagcgaacggacgattcaactccgcagagactttctggttgatagtcggtttgagtcgattccagtcaaaagttgcaatcaaaatgatcgccacgacaatcaacaacaagaaagcccctgaaatcgcagcggttattttgcctgccttgctcatcgttcgcttcctcatattcttcctgtgccagtcctaaagatagtccagccaggcggaaaatgaggcagcttatagcgccagaaccgccgtattcagcgtttctatcggtggcgggcgtgaaagaaaccagccttgtgcggcgaatgcgggcgagttctgaacatcacgccactcttccggcgtttctacgccctcgacaatcaccccgcgacaatagcgattcattagatgtaaaagctgagaaaagagtgtgcgtccttccggcgactgacgcagcatcacaaacagttctcgcgagattttgatgtagtcataacgcacttcacttagcgcagagaaatttgccatcccggtaccaaaatcatccagccacagcgggccaaattcacacatcgaggcaaaggttgaatctttcggcagacggatatgctccaccagttcgaaacgcagccagggaagacgctcaatctggcgcaggatttttggttgctgacgcagggcgatgagcgtagggccatcaatattgaccgatgccagcaggccgtgctctataaagaagtcggctttttgcgccagcaaatcaatctgctctttcacaacctccatccgatggctgacggtgatttcagtaaaatagcgatccggcggcaggcgttgcgaagggttcaagggatgcgtgaccaccgttaatagctccacggccattaaccgcccgcatgtttgatagatcggctgccaggtgtaagcacgctcacactgcaaccaaaaacgccgttcctgcaagctctcgatgcttgcttcagggttgcttattcgctggataacctgccttatcatcaaagatgtcctgtgtttaaaagtgatgctgcccggactcgacaaagattatcggcgcgtaagggcagaactttaccgcctggccggggtaaatttcctcactccacaacggaatctttcaggaatacgttctggctcaaaaaaataatggaacactgttttaatatggttgaccagcaaaccaccacagcgcaaactaacgctaattttttacagatcaggttcacgactatgtccaaaaagattgccgtgattggcgaatgcatgattgagctttccgagaaaggcgcggacgttaagcgcggtttcggcggcgataccctgaacacttccgtctatatcgcccgtcaggtcgatcctgcggcattaaccgttcattacgtaacggcgctgggaacggacagttttagccagcagatgctggacgcctggcacagcgagaacgttgatacttccctgacccaacggatggaaaaccgtctgccgggcctttactacattgaaaccgacagcaccggcgagcgtacgttctactactggcggaacgaagccgccgccaaattctggctggagagtgagcagtctgcggcgatttgcgaagagctggcgaatttcgattatctctacctgagcgggattagcctggcgatcttaagcccgaccagccgcgaaaagctgctttccctgctgcgcgaatgccgcgccaacggcggaaaagtgattttcgacaataactatcgtccgcgcctgtgggccagcaaagaagagacacagcaggtgtaccaacaaatgctggaatgcacggatatcgccttcctgacgctggacgacgaagacgcgctgtggggtcaacagccggtggaagacgtcattgcgcgcacccataacgcgggcgtgaaagaagtggtggtgaaacgcggggcggattcttgcctggtgtccattgctggcgaagggttagtggatgttccggcggtgaaactgccgaaagaaaaagtgatcgataccaccgcagctggcgactctttcagtgccggttatctggcggtacgtctgacaggcggcagcgcggaagacgcggcgaaacgtgggcacctgaccgcaagtaccgttattcagtatcgcggcgcgattatcccgcgtgaggcgatgccagcgtaaacgcagcatatgcaaaaggctggataaagtgttacccctctatccagctcatccataaatacctgatggttgtgctaactcatcaccatcaggcattactgtgcaggtggaatatccgtcacttcaggatgtacgtcatccgtggcgacagaggtggtcgcagcggcggtagatggggccatgatttgatcccagaccgcctgcaacgctttcatgttaaattccggctcgcctttcggctgcagcagtattaacgccatatcattcgacaactgttgacgcagatcctgatttaacatctctaccgtcaggctattaaggaaatcctgccgcagtttctgatattgctccggcgcgatatcgacaacctgattttgcaacgaacgcatccgctgacccatcagaatatcggtatcagctcgtgcataggcggcaaacagtttctgcagctccagtttcttttgcgccactaacgcattgaactcttcttccggcagacctttatcgcgaaccttcgccagttcacgcgccaccagattaaggttgctgttcagcttgtcgtttggtgattcgatgttgatggcacactgcgcacgcagatacagcacacggcagtcaaatccaagaccgatgtctttgctgttactggcacttaacgcttgctgaacatgccagaacagcgcctcgcgggccaggtccgcacgccagtagcgcagcagtgcggctgattcacgaatcggctgccacggcgtatcccacatgatagataaccggtcctgacgcaccgcgtcagtcataatactcaccgcttccgcacgcagcggagaaagcgtcggcaccggagctggcgtttcacgtttgcctttcagttcgccaaacgttttgtttatttggtcgacaaccgagcgcgcatccacgtttcccaccaccagtagcgtcattgcatccggggtgtaccatttctgatagaaatctttaattttttccgcttcaacgggttgtttcagcggatcggcaggatcgtgacctaacaaggttgaccctttcagacgatagcgccaccagccctctttagtatcggcaggccaggttgccaccatgtcctgactttgcagcgcgtggttgatggtttctggtgtgatggtcaatttgccagtggcatttgccagataagagagcgcttctttcagcaaatcgttacggttattgggcaaactcagattaaacagcgtggtgtcataagagacaattaccggcggcatcgggcgtttagggtcgatcccctgctgccacaatgaacgcgcctgtgctgcgtcaaggccaccgctttgcgttagcgcaatacgagggatggcgtgactgtaaccgctctgttgtgtactttcggcgagcgaaccggtattaaccagcaggcgaatttcaacacgatcgctgggacgctggggggtggtcagcacttgccactgtaaaccgttggaaagcgtcccctgttgccatgctggatcaggctggagcgcatctgcctgcacatagccagcagtggccatcatcagcaaaccgcccgctaaaagtcgaatttttgtgccctgcatgtgaacccctgatcaactatcctggtaataaaaaaactgcccgttgtcggtcagtctaaatgacgttaaaaacacttcgtgttagaccgcaagaacatgaaaatgtcacggaagaagtgaaataaacctgaactcacccaggtggtaagttcaggcacaggggtcaattatgcgcaaacacccgcactcggggaagggagtgcgggcataagtgatgagattaagaggataattcgtgcgttttgccatccggcgcacgattattcagcacatcgtccagttttttgtggtccagttctttcacccacttagcaacgacaatggtcgctacgccgttaccgaccaggttagtcagcgcacgagcttctgacataaagcggtcgataccgaggatcagcgccagacccgctaccggcaaatggcccaccgcagagagcgtcgccgccagcacgataaagccactacccgttacccctgccgcccctttagaagaaagcagcaacacgattaacagcgtgatttggtggacgatatccatctgactgttagtggcctgggcgataaacaccgccgccattgtcaggtatatcgatgtgccatcaaggttaaacgagtagcctgtcgggatgaccagccccaccaccgatttacggcagccgagtttctccatcttgtcgagcatacgcggcagcgccgactcggaagatgaagtccccagtacaatcagcagttcttcacggatgtagcggataaatttgaagatactgaaaccagtcgctttagcgattgaacccaataccagcaccacaaacaggatacaggtaatgtagaaacagataatcagctgccccagttgcaccagtgtgccgacgccgtatttaccgatggtaaacgccattgccccgaacgcaccaataggtgccagacgcatgatcatattgatgatgccgaagatgacctgcgagaaactttcgatgacgttaaaaatcagttggcctttgctgcccagacggtggagcgcaaaaccaaacagtacggcaaacagcagcacctgcagaatgttaccgctggcaaatgcgccaatgacgctcgccgggatgacatccataatgaaggcgacaatgccctggtctttcgcctgatcggcgtaaaccgctaccgctttcgcatcaagcgttgccggatcgacgttcattccggcaccaggctgcacgacgttaacgatgataagaccaataatcagcgcgatggtactgacaatttcaaagtaaagcagtgcgactgcgccggtacgaccgaccgccttcatgctttccatgcccgcaatgcccgttacgacggtacaaaagatgacaggagcgatgatcatcttaatgagcttaacgaagccgtcgccaagcggtttcatttgctcgcctatttcaggatagaaatggccaaggagaataccaatggctatcgctgtcaggacctgaaagtaaaggcttttaaacagagaggttttcatagggtgtcctttagtaaaaccacaggtcttgtaaggttatggggtacctgcggccttaaaataacacccagacaacatcacagaaatgtacctggatcataattgaaacaaaaaggttaaaaagtttgagctggctcgcacaaaccagcactttttaaagttttgtaatcagtttggggtagctacttttcttccaggtaactctcttcgaagatttcaatagggagtgggcgagcaaaaaggaagccctgggcaataccaacgcccgcttttgccagccagtcgcgttgtgcttcagtctccacgccttcggcaatcatttgtaagttcaggctctgcgccagcatgataattgcagcaatcatgctgctatctcccggcaagccttcaacaaacattttgtcgattttcagtacgtcgattggcaacgatttcatatgctgcagctgacgcagccctgcgtagcccatgccgaaatcatccagcgccacccgaactccggcattgcgcagcggacggaggattgccaccgcagcatgagggtcgtcaatacgtcggctttctgtcacttccagaatcagtgttcccggctgaatgcgatagcgggttaacagttccagcatatccgccaccatattcgggtgcatcagttgcagcgcagagaggtttaccgacaagggcagcataatgccgcgctcttgccaggctgcaagcaatcgacaggactcttccagcacccagtgaccgacggtaaccatcagcccacagcactcaatgcgatcgattaagccatccggcaggtcccaactgccatccggttgctggatacgcagtaacacttccgcactgaccagtttaccgctggtcatctcgacctgtggctgtaaccaaatagcaaactgatgattttccagtgcattaaggatatcgctctcttccgtcaaccgcttctgggcggcttccatctgctgcggatcaaagaactgaatctgattcttgcctttatggcgagcggtaaatgccgcagaaatagcgcgactgtaaagctgttcggcggtgagatcgccgtagaacatcgccacgccaatgctacagtgcggacggagttgaatacgttcaatcggcaggcgctcgctcatgatagtgagcacttgctgacctaaggtgattgcgtgccacggttcctgtacaccgttggcaatgacagcaaagtcataaccgctaatctgcgcgaggatcatacgtggcgacagtaccgatttgagtttttccaccagcgtcagcagcagaatttctcgttgcgcctctttcagcacgcccgcagtatcacgcagggtttcacaggtgatgatcatcagcgcggtggtttgtttacgcgcgacaacctgctccagcatctccatcagcaaggctttgttcggcaaatccgacaccgggaagcgcatcgcattttcgttctgttcttcataatggcgctgcagcaattgctggttgaggttgtaactgcgcaccaacataccgatttcatcgtcctgatgcagacgcggtaatgccagttggtgaccaacaagctccttggctgggatggcgttaagttcgcgagcaatattgcgtaacggatgcaaaatcaggcggttaatgcaccagctgatggcgacggtcaggataagcgacaaaagtaagtaaatggtcactaacgttgagagggtgctcatcacgaacttatacatacggaaggaatccgcctgtagtaccagataggcaattggctgcgggtttgccggacgttcgagcgagtaaacgcccagcgagatttgaaccggtagctcaaacaggcgagtaaccattaccggcaccgggcgctctggaataaaacttttacgcagcgcctggaactggttaggcagcactacatcggcacggctgaccacgcctgccggtttaatgctggcaagaatagcttccgcttcgggaatatcgcctttcaaaatagctgaagataagggttcgcggacagagcgagcaatgctttccagttgcgtagccgtgttatagcgattctgctggaccagatggaacagcaaaacggtgcaaaaaataaaaacgaacaccaggacaacggctgccaccattgccatctgcttgattgttaacgagcgacttacgcgcaaattgtctccccccggaaatcccagattgccgcccgagtatacccgatcgcagcggcattaagagaggcgctatctgaaaacttaccagtcggcgtaaggtatcagcggctgcggcggtaaatccatgtcaccctgccatccggcggcggaataacgtacgtagagcaggaaatggctgggtgcgtaatctttcgcctgctggatatcaattgccgtgccaacaaaccagttggaagtaacacgtcgttcaagtaatgcccgcgccgtgtagccgaagccctgactgctgccgccatcgttggattgccgcgcagcttcttcctgccagtcggtcgggatcagattcatcagcggataacgcggcatggttttggtgcgtgaatgcgaccacgagccagacgcacccagctcccacgaccagttttccgtgcgctcccgccacatcaccggtatggcaaacgacaggtattcctgcggactgtagtaaccgccctgaccgagtgagtagccactcagatctttgtcgtaatgccagatcatgttgttcaggccgattgtgacgcggcgattgttctggttaatgaccttatagtaatagcccgtcatccagcgcacgcgccagttatcttcgacatttttaccggttaactggtcgccactaagcgatgcccagacgccgtttgcttcacctttatcgtagctcagacttagccccacaccgtcggcacgtacgccaccccattttttcccggtattgctcggggagtctttttgcccaccaaaggccagcaaagaactggagatgggccgacggtgggcgttaacggtgtaacccagcggcccgatatcatcgctgtaactgatgccgccgaccacatccaccacgttgaagcccatcggcgtggtaccgatatcccagctccagacgtcatttcgccagccgaccgccacgctggcaccggaatccgactggctgcggttgccgctacagtcctgtaatgtacaggtgccccagttgtcatcccatttgccatcggcattagtggagatactgccgacgttcatattgacgaaatcactgcgaaagaacatccgcccgtcagaatacggcgcatccacctgcaacatggtagtgtgcgctttcagatcggagtaaccaccggtgccgttcgaaccccagtaatcgtgctcaagggtgacgttaagatcctgctggcgatagaggtccgccgcatcgctgcgcacgccacgtttcagccagtcatctttctcgtcgttacgggtcagtcgggtaaaggtgtcgttatcctgcggacgcgtcgtagtcacaccggatgcgaccatggcgtctttgtaggtttccagcgcctgcgttggatcgcccgcctgcgcttcaaacttcgcaccatcacgcagcaccatcgcgctttccatcgacggtggctgagattttgcctgcgggatcaacttattaaacgtccgctgcgctgctgcggtatcgccaagctgcgcctgtgccagcgccacgcgccgctgtgtgttcagcgaggcgttatcggtagcgggcagtttcgccagctggctacgtgccgccgctttgtcaccggcagcaatatccacttccgtcagaccaagaatggcgtcggcgttagctggctcccgcgtcaggacattctgatatgcagcgcgggcggcggtgtaatcacgtcgttgttgcgcccagtcagccagcgtgaggtcaatacgcgtggaaggtggttgctggcgcagcatcgcttccgcttctgcctctttgccgctttctcgcaggcggttagcggtttccagcacctgatcgctttgcagtcgattaaccagctcctgaatattgctgttccactgcgcacgcggcaggctgttgatatgcgccagcgccgctctgtcctggtcatgaccagagaggtacagcccgtaagcgtaaacctgctccgggtcgttcgacttctgctgcgccagattgcgcattaacgtatcggcctggctgcgttgtccggcctgccagagatcctgcgaaagtcggtaagtaatccatacgctgccggggtccagcgccagtcgttgccgctgaagtgctgccgcctgcgcccatttgccctggttttccagtgcctctgcctgctgtgccagacggtcgttttgcaggctgcgttcgatatcatcaatgctacgccgctgactggcagagagcgaggcgataaacgcttcagctttttctggcgattgctggcggtaaatatttgccagcccgcgcacggcgttagtgttgccgctgtccatacgcaaggtctgctgataataacgttcggcggcgggataatcttttcgcgccatcgccacatcgcccagccccagcactgcataactgtcggtgttatcgacattacgcgcctgctggaacaggcgttctgcccggtcaggattattggctttcagcgcagcatcgccctgctggatcgccagccagtagcggtttactttcagcagactgttccatttgtcgttgttgctgctgtgcgggtccagtgcgagggctttttccagattcgccactgcattggcgcgatcgcctttctgagaatacgcctggcccagcgcccccagagcttcactgtctttcgggttcgcccgcaccgcctgttgtagttcgggaatggctttacccgccataccagagtccaccgccgctaaaccttgcgcacgagcgcggaaagcaggatcggccagctgtttttgctgttctgccagttgcgattgcgcagccgccacgctatcgccatcactaaagatcgagagatattttttcagcgccgacacactggcatcactgacgggcatgtctttaatctgcccgtaccagattttagaggccccttcgcgcccggcgttcgattttgccatctgttccaggacggcaaaaccttcgtcacggcgatcgctactaaacagcaatagcgccagattgttttgcaggcccgtattgcccggtgcatccgcattgatgcgttttaactgattaatcgcttcgccacggcgagccggaattttcgccaccgtactccagtactcgacagcaatgtcaccttccggcggcgcaccgttgaacagtttgttgtaactcgccacagcttcttctgcatgaccggtcgtcgcctgcaatcgtgcctgttgcagtgcctgacgaccatccggcgtggaaagtagcatcgtagtccgcgacgatttatacgcatttgaactcggcgctaactgcgacagccgatcgagctgtttttgcgcgccatcaatatcgccctgacgtaacaaagaacggaaacgggcggcaacgacgtccgggttattcggatcaataagttccagccgatataacgactgttgcaccagatcttcacgatgggtcgcttcgcctaaccgaacttgctccagcaactgttgctgagcggttggtgctgcctcgaccatcggcatgacggccagaccgagggaaagcgtgaatatgtttagtgtgaatttgcgcattcctggccccagtcaggtaataactcaccttttgtcgagaagcggaaacggtgttgatcccagccttgtccaaacagggtcagcacatagttgtaataggcatcgctgccgggaaagttatcggccacgcgctggcgctgaacggcctgcgcatcgcggttttgtaaaaagggcagcatggcggcagaaaaaccgactggtcctttaccctgcgctttccccgtagccacatccactttttccggcggataaccgtttttctcagtgaatgtcgccatcggtttaaaccggttgagcatccgcgctttttgcggatcgctgtcaggcatcatgcctacccacatgtaaacgcggatagcgtcgtagctgctgatcaatgttttttcggcttttagctgccagcctttgtctttctcatagcgcacccagtctggcgaaaaacctttcggggcggtttccagcaataaacgttgattggtttcgcgcagcgtggtccacggcgcgccaaagcgggtgaaatactgcgccagcgtcggcggcaggtagctggggttaaaacgccagctgttatcctcagcaaaacccactttgcccggtaacaacatggaacccagcccaggcaccgtcaccacttcctcccgcgcgatacgttttagcaacgcgctgccgatgtcggtataacgctgctctttccacaaacgccccgcctccagcaacgaccaggccatccagacatcaccatcggaggccgaattgctgtccagcacttcccacttactgttctctttcttgccccacagccaggcgggcaaacgttcttttaaagaaccctgagcgagattgttctgcgtccagtcgagaatattatcgaaagctgcacggtcgttagccgccagggcagagaacatgccgtaactttgcccttcggaggtggtgattttgcgcgcgtcgctggggtcgatgacgcgcccttcctgactgatgtaatcctttttaaactgctcccaggcaggccaggtacaggctgcctgaacactaaaggcagccagcagcagcatcgtcacgattccactacgcaacacattcatcttcaattactcgttatccgggttaagacgacgacgactaataattcgcagcagacgccacagtacccatgccagcaatatcacactgatagccgccagcaccgccagcagaatcggatggtttgccagcgcataccacacgcgctcgaaccacggcagatgacctacgtaataaacgtcgccaacacgtaggctgttgataccggactcgcggatcaccgcgaccgaaccgaacatggtggcgcgtttgccgctatcgttcaccgcatcgttaagcatttcataaccgcgtgggctatctgccaacagcgcaatcacgctgcgctggtcgttatacggcgactggaagccaatcaccgccgccatcgcaccggaagaggtcagcgttgaccgggtttctgccgcgcgatcgctctcgtccggcacaatgccggggaacggggtctggcgcatcggtgttttcacccagctttcggtcgcctgcaccaataggtcgatctgcttatcgtctttcagtttgtccgggataccaccgatgatcatgatgtcggcatctttgccctgaatggtgctgccatcatcggtcaccgtcagattaatcgccgggaagcccgtctgtgcgccgataaaaccaacagtattcagcaacgtttccatctgtgcttcgttaggcgctttcggcatcacggtgatggtttgcgacagatccgccatccggctgaatgggaagcccgcgttagcaaaggcgcgtagatccggcatcgggatgaagtggtaatacttcgagaagtcgatggtggagtcgtcaccaatcaccacatgattctgcaccggctggaaggtaatacagttatccaccgaaccgcccggcatcgggttcatatactcaaagtcgaagcgcagctggttggtcgcgcccagtttcagcgccggaatagagacatctgttttgccatccagcaaaccttgtaataccggaatccgcagcagcaggcggttcgcctcctgtttgctgctcaggttgaaggattgcaggaactggttattcaggctgatatccatccgcgaactgtctttcaccggcggcatggtgtagcggtaattaatatccatatcaatgccggtactgcgcatcaggtagagatccggcggcaggtttagcgaaacgttaatcgctgctggctcaagaccgctggattgtaactgttcttcataggttttcagttcgccaaatgtgaccggacgatcggtacgtacccagttcggcgcatcgtacggcttacgcggtagcagcggtttcacttcattcactaccacgctttcaccacggaacagaatgttaccctgagcgatacctttcgctgcctgcaacaggtctttgtcgtcacgaccaaacaccaccagcagtttgacgtaaggattctgcggatggttaatcatctcaatcaccggggcttttaccgccggatgatcgcgcaggaagtccggccgtttgtcgttggttgcaaagacaatggcattgcgatccggcagttggttatagagtaccgggaagttctgcccacgccagccagaacgcgaaccaaaccacgaggcgacaatggcagaggcttgttgcagcccaacatccggcgcacccgcaaagaccatcggcaaggtgttggtgcggttatcgcgcgggtcaaagaatggcaccgggaagtgtgacaggtcattcttcacattcagggtctgataggtcagatccagtccactgctccgcccaacatccagccaaagcgtggtgctggccgggttttcgcacacgtcctgataatggccgacaaactccagccgtacacggttgaagtcggtaataaacagtgggttaatgggcatttgcgccagcgtttttttacccaactgttctttggtcactggcagcacgcccatcagttcatcattgagataaacctttaactgcgactggacaggcagtaacgatggcgatggggtgtattcgaggttgagcatcgccttcgtcaccacttcatcgctgcgcataccaaactcaatgctgccgttcgggttaatgccacgtagcaccatgctgcccggcggcggtgcaatttgcgcaaaggtcagcttcacatcacgcgaaggaccgttctgcgccacgactggcgcatcagcgccctgcacgcccggcatcacttgccccacctgcggattttgttccgtctgggcggctacagctggctcagcattgatcagtggttgcgttgctggcgtcgcctgcgtcatgaaagaggggaacgcactcatccccatagccactgcacaaatccagaatagttttcttttcatcgcgttatcatcattgttgagccaaagcctgatccgatggttgtgccgtttcgctccgctccgggcggcgcggaataaacgatacaacccaggaaaccagagaagtcagcacacggaatatgcccttcaccgaagaaggcgcaaactccgccagatggcggtagccacggaagccgagcttcagaatatccagcagactttccagcggcttatcttccgggtagctgtcctgccagagcgcccatgtatccgcacgggcaaacgtacactgcacaaaatcgatatgttgctgggtggtgagcggcattaatttcagcccaacttcattacccatcacgcgcgccacctgggtcgggaagacgtattcctgctgaccgcgtttaagcaacagattcactttctgcccttccagaatctgcgcctgaccgttgatcttgatccccaaaccaccgtcggagaaatcctgaacggtacacgagaagaggtgaccatcttcgcgggcaattgccgcgggcatcgtcatctccacgcggtgcgatcggcgtacctgtttgctttctaccgataccgcaactgcgccgccaagaacaatcaggttgtagaacacccacaccatactgacgaccacggtgagcatctcggttggcgggccatagaagtagcgccagatgcctaccgcaacgcccaccaggttgagcaggacaaggaagatgtagggccgcgagatcacccagtcgacgtactcttcttccaccagtccacctttggcggtgacgttaaatttgcctttgtgcgggttaatcagcgccaccagcgtcggtggtgcgatataccacgccagcaccgtttcgtagatttcactccagaaagagtggcgatatttgccctggatcttggagttggtcaggctggcatggatcatatgcggcagcacgaatagggcgatcatcaacgctggcgcatagatgatgtaggcatgaagcagcaggaacgccagcggcgcagtcaggaagatcagccgtggaatgcccgacaagaagtggaacatggcgttgacgtaacatagccgctgagcaaacttcagccctttaccggtgagcgggttatcgagacggaagatttgtaccatcccgcgcgcccagcgaatacgctgaccgatatgcgccgacagactttcggtcgccagccccgccgcctgcggaatacgcatatacgcggaggtatagccacgacggtgcaaccgcagagaagtatgcgcatcttcagtcacggtttcgacagcaatgccgccaatttcatccagcggcttacgacgaatcaccgcacaggaaccgcagaagaaagtggcgtcccacatatcgttgccatcctgcaccagaccatagaacagcgtgccttcgttcggcgttttacggaaacgccccaggttgcgttcaaacgggtccggtgagaagaagtggtgcggcgtctgcatcatcgccagctgtttttctttcaggaaccagcccatggtcatttgcaagaacgatcgcgttggtacgtggtcgcagtcgaaaatcgacacgaactcgcctttggcatatttcagcgcattgttgatgttgcctgctttcgcatgttcatgagtggtgcgggcgatatatttcacccccacgttttgcgcaaactggcgaaactcttccctgccgccgtcatcaaggatccagatattcagcttatctttcggccagtcgatacccagcgaggcgtaaatggtatttttcaccacgttgagatcttcgttgtaagtcgggacaaagatatccaccgacggccacagcgacatatctttcggcaatggcaccggctgacgattcagcggccatactacctggaagtagccgagcaccagcacaatccacgcgtacgtttcagcgaagagcagaataagcccgcacaccaggctgaccggatcgtcccagttcagcgtagaggtgtaacgccaccagatataacggcaagaaacggtcagcgacagcacaatcaacattagcgccgagaagcgccccggcatccgccgtacgatcagcgctaccccccacagcagcatcaggaagataaactgcgccagcgggttaaacggctgagtaacgcagattaacgccagaatcagcgagaaggtgacgatgataccgaggatcaaccgccgcgccccggcactcaaatgaccgagctcttttttctcatccagatgctgtgttttatggctaacgcgctcaggcagctcgttcatccattgatggtaacgtccacgaatattttgcagacctgaaaatgcccgcctgcgcggtttcggcgtttctttgcgcgatgcaccgatcaataaccagcatgtttgaatgagataacggaccgggtccagcggacgcggacgcgaggcgttgatatgcggatacaggtttttatgttctgcgcgaatacgctgccagcgcgggtgctccagcggaataaaaatccaggccaggatcatccagaaacagccgagcgtcgcgctgaaagccgacgcaccgtgacgacgataatcgcgataacgcccgataagccgcgcgttgaccggcgggataagcaaccaccgggtcaggatactcatgatgcactcccgactggcgttttcagcccggagtagttcaacaggcaccagttcgccagcgtcagtatctcttcagccgccagcgcatcactgcgatattcacctactggttgcttagccgccaggcattcagccatcgcttcatcacgatgaatgagcatcggcagtaatcggcgctggctttgcaaccaaagctggtaaatatcgtcctgaacctgactgccaatacggaagtcattaatcaaaatatgtgcgccatccggcagcgcttgctgatgcagtcggatatggcagttggcatccacattgacgattgccagcgagtgatcgcacaaactcagcagctggtgggttatctgcgaggcatcacgcggtaagtcgattaaaatccactggtaacgcccgctggcttttagttgctgtaagccggagcaaatatcgctcagccgggtttgccagtgctgtggattttcttgttcttcaatggataactgaccaaaaggcagcaaatcgagctgcgaggtgtagcgcaacccagcgtcacgccagtcctggccatccagcatcgctctggcccagccctgacggtgggtaaaatcaacattaaatgacaggcgcaacaagttgtccgggcaggcatcgaccaccaggacattttctcccaacatttgtaatgaccaggctaatgcggcggtgatggttgttgtccccacgcctccccgcaccccctgcaatcccagtacggccattcaccaatcccctacttttgttgcgcaaactctgccagcaacggccagcgttttaatgccgcggccaactgttcgcgttgggaaatatcggcataatcaatatcaggcagtgaaaatgcctgctttaacgccacaatatcattctggaagatatagcctatcgcgggatcaggcagagtatctggttcattgttattcattttgcttgatccctatgaaataaccgtaccgttcatgagacaattctaaccgtgagcatttcgccggtttattgtttacggcgagacgggaatttgctcactttttgactttccgttacgcaacagaaaaagttaaaaacgaaaagactaaaatcacacgtcttgtgaccttctaaattgattcacatgctaaatctgataagttttaatttcaatggtaggtttatttcttagctttcgctagtaaactgataatcagacaaaatggtgacatgagggacattgtggaccctgtattctctatcggtatctcatcattatgggatgagctgcgacatatgccagcaggcggcgtctggtggtttaacgtcgatcgccatgaagatgctatcagtctggcgaatcaaacaattgcatcccaggctgaaaccgcacacgtcgcggtcattagcatggacagcgatccggcgaaaatctttcaattagatgattctcaagggccggaaaaaataaaattattttcaatgctaaatcatgaaaaaggtctatactatttgacccgtgatttgcagtgttctattgatccccataattacctttttattcttgtttgcgcaaataacgcatggcaaaacattcctgccgagcggcttcgctcatggttggataaaatgaataaatggagcaggttaaaccattgttcgcttttggtaattaatcccggaaataataacgataaacaattttcattgttgcttgaggaataccgttcactttttggtcttgccagtttgcgttttcagggtgaccaacatttgctggatattgccttctggtgcaacgaaaaaggggtcagcgcccgtcagcagcttagcgttcagcaacaaaatggtatctggacattagttcaaagcgaagaggcggagatccaaccacgcagcgacgaaaaacgcattctgagtaatgttgctgtactggaaggtgcgccgccgctatcggaacactggcaactgttcaacaataacgaagtcctgttcaatgaagcccgtaccgctcaggcggcgacggtggtcttttctttacagcaaaatgcgcaaatcgagccactggcccgcagcattcataccctgcgtcgccagcgcggtagtgcgatgaaaatcctcgtgcgggaaaataccgctagcctgcgcgccaccgatgaacgtttgttattggcctgcggtgcaaatatggttattccgtggaatgcgccactctcccgttgtctgacgatgatcgaaagcgtgcaagggcagaagtttagtcgctatgtgccggaagatatcactaccttgctgtcaatgacccagccgctcaaactgcgtggtttccagaagtgggatgtgttctgtaatgccgtcaacaacatgatgaataaccctctattacctgcccacggtaaaggcgttctggttgccctacgtccggtaccgggtatccgcgttgaacaagccctgacgctgtgtcgccctaaccgtaccggcgatatcatgaccattggcggtaatcggctggtgctgtttctctcattctgtcggattaacgatctggataccgcgttgaatcatattttcccattgcctactggcgacattttctcaaaccgtatggtctggtttgaagatgatcaaatcagtgccgagctggtgcagatgcgcttgcttgccccagaacaatggggcatgccgctgcctttaacgcaaagttctaaaccggtcatcaatgccgagcacgatggtcgccactggcgacgaataccagaacccatgcgactgttagatgatgctgtggagcgctcatcatgatgaccatcagcgatatcattgaaattattgtcgtttgcgcactgatatttttcccgctgggctatctggcgcggcactctttgcgacgcattcgcgacaccttacgtttgttctttgctaaacctcgttatgttaaaccggccgggacgttacgccgcacggaaaaagccagggcaaccaaaaaatgactcaatttacgcaaaataccgccatgccttcttccctctggcaatactggcgcggcctttccggctggaacttctattttctggttaagttcggcctgttgtgggcgggatatcttaacttccatccgctcctcaatttggtgtttgccgcgtttctgctgatgccccttccgcgctacagcctgcatcgcttgcgccactggattgccctgccgatcggctttgctttgttctggcatgacacctggttgcctggcccggaaagcataatgagccagggttcgcaggtggcggggttcagtaccgattatttaatcgaccttgtcacacgctttattaactggcagatgattggggccatttttgttttattagtggcctggttattcctgtcacaatggattcgcattaccgtttttgtggttgccatactgctatggctgaacgtacttaccctggcgggaccaagtttctccttgtggccagccggacaaccgacgaccactgtaacaacgacgggtggtaacgcagcggcaaccgttgcggcgacgggtggcgcaccggtagtgggtgatatgcccgcacaaactgcaccgccaacaacggcgaaccttaacgcctggctgaataatttctataacgcggaggcgaaacgtaaatcgaccttcccgtcttcgctgcccgctgatgctcagccatttgaactactggtgattaacatctgttcgctttcctggtcggatatagaagccgccgggttgatgtcgcatccactgtggtcgcatttcgatattgagttcaagaactttaactccgccacctcctacagtggcccggcggcgatccgtttactgcgcgccagctgcgggcagacttcgcacactaatctgtatcaaccggcaaataacgactgctatctgtttgataacctttcgaaactgggctttacccagcacctgatgatgggacataacggccagttcggcggttttttgaaagaagttcgcgaaaatggcggcatgcagagcgaattgatggatcaaacaaatctgccggttattttgctgggctttgatggttcgccggtttatgacgataccgctgtgcttaaccgctggctggacgttaccgaaaaagataaaaacagccgtagtgccacgttctacaacacgcttccactgcatgacggcaaccattatccgggggtcagcaaaacagcggattacaaagcgcgggcgcagaaattctttgatgaactggacgccttctttactgaacttgagaaatcgggtcgtaaagtgatggtggtcgtggtgccggaacacggcggcgcgctgaagggcgacagaatgcaggtatctggcctacgtgatatccctagcccgtctatcaccgacgtccccgttggggtgaaattcttcggcatgaaggcaccgcatcagggggcaccgattgtcatcgaacaaccgagcagcttcctggctatctccgatctggtggttcgcgttctcgatggcaagattttcaccgaagacaatgttgactggaaaaaactcaccagtgggttgccacaaacagcaccggtctccgagaactcaaatgcagtagttattcaataccaggataaaccgtacgttcgcctgaacggcggcgactgggtgccttacccgcagtaagaacgaaaaaggccgcagagtttcccccctgcggcctggtccgggcgcaaattgccattacggcagcctgacgcccgcatgacacgttacttccgcttgttcagccagttcacgatcatactggcaagaatgccagcaatgaccggagccgctaaatcatgccagaaggccatgcccagctctgcgaacgtcatatagccgcctgtgttgtaatgacaacgtttcgcggctattcttgagtggtctagagtcaagattagcccccgtggtgttgtcaggtgcatacctgcaacgtgcgggggttttctctctccagcaaccaatgccaccagggataaagcccccgcaacattgcgcctcaccggaacctttccggcttgccgctgattctacgattgctttttactgtcagcacccggcaatcttcctcattgcgcgatgccttccagcttaatttctttatttgcaatagttgcagttcatatccgggctgactccagactggtagtgaaatgcgcaattttgtagaattgcgcctcctcgcgacctccccagtgaatctgttgcctcattttttacatactgcgtattcgacttctccacctgttgcgcaagagaaactgggtttattcatttttgcgaggccgacttctttctggacaggactttatgcagcacaacacactatcgaaacacaatcagaaattgccgtttacacgctacgacttcggctgggttttattatgcataggcatggcgattggtgccggaaccgtgctgatgccagtacaaattggcttgaagggaatttgggtatttattaccgcagcgatcattgcttatcctgccacctgggtagtgcaggacatttatttaaaaaccctttctgaaagcgattcctgtaatgactacaccgatattatcagtcattacctggggaagaactggggaattttcctcggggttatctactttttgatgattatccacgggatttttatctactctctctccgtggttttcgacagcgcctcgtacctgaaaaccttcggtttaaccgatgccgatctttcacaatctctactttataaagtcgctattttcgccgtactggtggcgattgcgtctggtggtgaacgattactgtttaagatttccgggccaatggtggtggtcaaagtagggattattgtcgtgttcggttttgcgatgatcccgcactggaatttcgccaatataaccgccttcccgcaagcctccgtctttttccgcgatgtcttgcttaccattccattttgcttcttttctgcagtatttattcaggtacttaacccaatgaatattgcctatcgtaaacgggaagcggataaagtactggcaacccggctcgcgctgcgtacccaccgaattagttatatcacgctcatcgcggtgatcctgttttttgccttttcgtttaccttctcaattagccacgaagaagccgtttctgcctttgaacaaaatatctcagcactggcgctggccgcgcaggtgatccctgggcatatcattcatatcacctctacggtgcttaatatctttgccgtactgaccgcattctttggcatttatctcggtttccacgaggccattaaaggcattattctcaatctgttaagccgaattattgataccaagaaaattaactcacgcgtgctgactctagcgatctgcgcttttatcgtcattacgttgacgatttgggtttcgtttcgtgtatcggtgctggtgttctttcagttgggaagcccgttatatggtattgtgtcgtgcctcattccgtttttcctgatctataaagtcgcacaactggaaaaacttcgcggatttaaagcctggctgattctgctgtacggcattttgctatgcttgtcgccactgttgaagctgattgagtaaaccggagcgcatggccccggttttgtgagttaacgctgcggattttcatcctgatcaacagcaaaacaagctaccagttgaccgccgtagtcttttagctgcggctgcaactgggtgcaggggccgaagcgccgacgacagcgggcgttgaaggcgcaacccggcggtggattcagtgggcttggtagttcaccgctgagcttgatgcgctcgcggcgatcgtccgggttcaggcgcggcgtcgcggaaagtagcgcctgagtgtacggatggcgcgggttattgaagatttggtctttcgttcccttctccacgcagcggcccaggtacatcaccatcacttcatcagcaatgtgctccaccaccgacaggtcgtgggagataaagacataagacagccccaactcctgctgcaaatccatcatcagattcagcacctgcgcgcgcactgaaacatccagcgcggaaaccggttcatcggcaatcaccacatccgggtcgagcatcagaccacgggcgatggcgatacgctgacgctgaccgccggagaacatatgcggatagcggtcatagtgctcggttttcaggccgactttcgccatcatcgacagggctttttcccgacgctgttctttgcttaagctggtgttgatcagcagcggctcttcaagaatttgcccgacttttttacgcggattcagcgaaccgtaagggttctggaagacgatctggattttctgccgacgcagcttctgcgcctgcggatcgtgcttaagcagatcctgcccctggtaatacagctcgccaccggtgggcatttcaatcatcgtcagcaaccgaccgagggtcgatttaccgcagccagattcgcccactactgccagcgttttgccacgttcaaggttaaacgaaacgccatccagcgctttaaccagacgttccggcgcgaacatgcctttcttcaccggataatgttttttcaggtcgatagcctgcaacagcggttgttgcagggtggcctcttgcgtactcatagtgtcggcctcccggcatcatcaagtgggtaatggcatttggactgacgcccgtcagcgagcatattcagcgccggttcttcagcgcgacatctgtcagtggcataggggcagcgcgggttaagcaggcagccgttcgggcggtcgtacttgccgggaacgacacctggcaacgacgccagacgttctttgtcctgagcaaattctggcagcgcacgcagcaatgcctgagtatacgggtgacgcggcgcatggaagatggcgtgcgcatcaccggtttccaccacctggcctgcatacatcacgatgattttatgtgccgcttccgccaccagcgccaggtcatgggtaattaacaccagcgccatgttctctttctgctgtagctccagcagtagttcgatgatttgcgcctgaatggtcacgtccagcgcggtggtcggttcatcggcaatcagcagttttggccgacaggcaatcgccatggcgatcatcacgcgctggctcatgccgccggaaagctgatgcgggtaaacatccagacgcgatgccggatcgggaataccgacctgattcagcaggtcaatcgctcgctgacggcgggtacttttgttgccgccctgatgcaccttaatcgcttccataatctggaaacccacggtgtagcacgggttaaggctggtcatcgggtcctggaagatcatcgccacttcggcacccaccaggttgcggcgctctttttctgagatacgctgcaaatcctggccgttaaactccagtttttctgccattacgcggcccggataatcaatcagccccataatcgccagtgaactgaccgacttaccggagccggactcacccacaatcccgaccacttcgccctgttttacgctgtagctgatgcggtctacggcgcggaacggcgcgctttcgtcgccgaaatgcaccgataatttatctacatttaataacgccatctcgaacctcttactgcttcagtttgggatcgagcgcgtcacgcagaccgtcacccatcaggttaaatgccagcaccgtcagcaggatcgccagacccgggaaggtcacgacccaccaggcgctttgcgcgaactgcaacacgtcggagagcatggtgccccactcaggcgttggcggctgtgcccccatgccgaggaaaccaagagcagccatatcgagaatggcgttagagaaaccgagcgacgcctgaacaatcagcggcgcaaggcagttcgggaagatgttaataaacatctgacgcatcgccccggcacccgccacgcgagacgcggtgacgtaatcgcggttaacttccaccagcacggcggcgcgggttaagcgcacatagtgcggcaaggcaacgaaggtcagtgccagcgcggcgttaccaatcgacgggccgaaaattgccaccagcaccagcgccagcagcagacttggcagcgccagcatgatatcgaccacgcgcataatgatgttatcgaccaggccgccaaagtaaccggcgatcaggccgagaataacgcccataatcagcgataacacaactaccagacagccaaccagcagcgacaggcgcgcaccgtacatcaggcgcgacagcacatcacggcctacgtcatcggtgcccagcaagtgcgccatgctgccgccttcctgccaggctggcggggcgagcagtgcatcgcggaactgttccgccgggttatagggtgcaatccagttggcaaagatcgcgatgaacagcacgatgacgacgtaaaccagcccgacgaccgcgcctttgttgcgtttaaaatagtgccagaactcctgtaacggggtcatcggcaccggtgcgctaatcactttattttcagtaacctgtgacatgatgtccccttacttcttatgacgaatacgcgggttcaccacgccgtacagcagatcgaccagcaagttgacgaggataatcatcgtcgccaccagcaatacgccgccctgcactaccggatagtcgcggcgttgcagtgagtcaatcaaccagcgtcccagaccgggccacgagaagatggtttcggtcagaatcgcccccgccagcaatgttcccacctgcaggccgataacggtcaccaccggcagcatcgcgttacgcagcgcatggacgataatcacccgcatgcgggttagccctttggcgcgcgcggtgcggatgtaatcctcgcccagcacttccagcatcgaggagcgtgtcatacgcacaatgaccgccagcggaatagtacccagcacaatggcaggcaagatcatatgggcgacggcatcgataaagttgccgtcttcaccccagatggcggtgtcgattagcataaaaccggttaacggattggagtcatcgaggaacaccatatcgctcacgcgaccggagacgggcgtcaggttccagtgcaccgaaaccagcatgatcagcatcatgccccaccagaagataggcattgaataacctgtcagcgccaggccaaccgctgtgtgatcgaaaatggaaccgcgtttaaccgcagccagcacgccgaccggaataccgactgccgtagcaaaaatcatcgcgcagacgccaagttccagcgtggcctggaagcgcggcacgaactcttcccaaaccgggatgcggcttttcattgaaatgcctagatcgccatgcataacgccccaaatgtaatggagatactgctgccacatcggtttatctaagccgagttcagccagcagctgcgcgtgacgctctggggagatcccacgttcgcccgccatgatcatcaccggatcgcccgggatcatgtggacaaaggcaaatgtgagaagggtaataccgataaacgtggggatgacgagtcccaaacgtcggagaataaactgcaacataacccggattctctatagtgacccgcagcctggaactgcgtgtctgtattgctcacaaatcaattcccgcccttatcggacagggaatgaagtattgctgccggatggcgctgcacgcagaggcacagcgccaccgggtatacagattgttgacaaagtgcgctttgtttatgccggatgcggcgttaacgccttatccggcctacaaaatcgtgcaaattcaatacattgcagaattttcgtaggcctgataagcggagcgcatcaggcatttttgcctttgccatcagtcttgtatggcttttaattattcgatagagacgttttcgaagtgatgtttgcctaatggatcaaccacatagcctttaacttctttacgtaccggttcaaacacggtggagtgagcgatgatcagtgccggagcctgatcgtgcatcaccacctgcgcttgtttgtacagttcaacgcgtttattgtggtcgtcggtagcacgcgccggttgaatcagatcttcaaacggtttgtagcaccattttgagtagttggagccttgttcagaggcggcgcagctgaacagggtggcgaagaagttatccggatccccgttatcgccagtccagcccatcattaccgtctggtgctcgccatctttcgcacgcttgaggtactcaccccattcgtaggtgacaattttggcctgcacgccgactttcgcccagtctgcctgaatcatctccgccatgcggcgagcgttcgggttatacggacgttgtaccggcatcgcccacaggtcgatggagaaacctttttccagacccgcttctttcagcaaggctttcgctttttcaggatcgtaggtgtagtcctgaacgtcgtcgttatagccccacatggttggcgggatcaggtttttcgctgatacgcccgcgccctgataaaccgctttgatgatcgcgtctttgttcaccgcgtaggtcagagcctggcgaactttcacgtcatcgagtggttttttctgcacgttatacgagagataaccgacgttcagccccggcatttccatcagattgatggatttatcctgcttcatgcgagcgatatctgccgggttcgggtacggcatcacctggcattcattcttctgcaatttcgcgtaacgcacggaagcgtcaggggtaatagagaaaaccagcgtatcgatctgcggtttggtgccccagtagccatcaaacgctttgtagcggatacgggaatctttttgatactgctgtaactggaacggaccggttccgattgggttgaggtccagtttttccggtgtaccggctttcatcatcgcatcagcatattcttttgacagaatagaggcgaagtccattgccaggtcagcgaggaacggcgcttccgggcgagtcagcacaaactgaacggtgttgtcgtccacctttttcacttcactgatcagctctggcaagcccatgccttcgaagtattcgtagctgccgccagaaactttatggtacgggttttgcgcgtttttctgacgatcgaacgagaacaccacatcatcggcgttcagttcacgcgtcggtttgaattctttattgtcgtgccacttcacacctttacgcagatggaaggtataggttttaccgtcttcgctgacttcccacttttcagcgaggcccgggatcacttcggtggtgccgattttaaattcaaccagacggttataaagcgggacggaagaggcgtcataggtggtgccggaggtaaacagctgcgggttaaacccttccggagatccttctgagcaataaaccagagttttagcctgaacacttgctgcgacggtcatagccaccaggctgagaccaagcttcagcatccctgactttttcaaggaaatacgcattattctgctccaattgtgatgtttgttgttttaaccctttgcagtgggttgtcgctgcctgaccttttttgttttttgcccggtcgggtcaacgttatgaggtggggatgccgtactaattaacatcagtgtaacagtgcggatcctccataaaatgcccctcgtgacctacaatctgtcaacagaatgtgaaaacgtcaatacagccaaccgggatttacaccaacggtgagaatccacaaacaaagattaaaaaaacttcaaacagctatttgcagcagagaaatttgtgctactccaacatgaccagaacaatcagcttaatatttagcaacatttggtgattaagttttatgcatttaatgaaaaaaatctgaggaaaaggtggatatctgagcgattaataccatgaacgctaaaacgcacagcggaaaatgccagggccagccataagtaacgcaaaaaaagatttaagcaaatataaaaaaagacaatggtttctgtcacaaatccgttaatggatagtgagatatggggcgcaaatttggcagggaaatgtgtgtcgtgtaggtcgaataaggcggtcgcgccgcatccgacaatggccggcacatttgcctgatgcgacgctgacgcgtcttatcaggcctacgtcgagtcgaacctccctgcccccggaggttctcatcctcatgagctgcagatgcaaaaaagcctgctcgttgagcaggcttttcgaatttggtcggtgatagaggattcgaacctccgaccccttcgtcccgaacgaagtgcgctaccaggctgcgccaatcaccgaatgcggggcgcatcttactgcgcagatacgccctcgtcaatcccttaatagcaaaatgccttttgatcggcgagaaagtcagcaggccgcttagttagccgctgcctcttttgcctgcgggatgtgacaccagttgttgttttcgttaattccaccatccggtgaagtatagccaagacaacccatgatggtatcgtacagctctacgtgacggcgtggcactttcatgtcggcttcttttttcagctgcgcaaacgcctgcgcattggccggattttccagatatttatctgacatccagaccatcatcggtacgcggaactgctccggcggtgccagttcacgcggcgtgccgtgcaggtgctcgcgttcattaattgactcaccgtggtcagctgcgtagaacacaatcgctttcttatcgcgaacctgatcaatcacgctggagataaagtgatccacataggtcaccgagttgtcataggagttgatcatctgcgctttggtacagccgctatcaacaccaatacattccggcttccactgcgcgaagctacgcggataacgctgggtgtagttaaaatgcgaacctttggtatgcagaatgatcagatgcttaccatccgggttgcgccctagcgattgctgcatttcgtctaccagcaacatatcatctaccggcttgccacgattacgtggctccgcaccaatctgctcacgataagcaatgttgtccgccatcgtgttgctgtagaaccacatttcgctctgcatagcgtagaggtcagaactgaatcctaactgcttcagaaccgcgaaaatgttctgttcttttaatgtgcgctgcggattatcttccgcgcccccctgacgtacaaacatgcaacgcagtgagagtttggttgcggtatcacaggagtaaccacggaacgccgccagatttttctcctgggccagtttcggcgtggtattacgctcatagccgaaaatacccatatggtcccaacgcgtggtttcaccgatgataaacacgacataagtgtcatcaacgttttgcggtgcctgataagtgaatttcttcgccggattaagcaatgaattattatcggaagattcatcgacccgcgcccaggcatacagccccaacgcagaaagccagtttgatggcagataagagttcgctacgacaccgccataactcggcaaatcaacgccggtcgccctctccactttcttctgctggatatccagcaaacgaatcggtgcccaaaccataatacccgccagtacgacgaccgccaggctgcgaatacgctgccctggggttcgcagttgtcggagcaaggtgtagcgacagcggttattccagataaggataagaggcaatgcactaacggcgattaaccagagaataaagttcagaccaacaacttcttttgacaggtcgatatcggtggtcatgacggaagcgatgatgccataaccaatgaccacattaaggaaggtcatgtaatagctggcacctgcggaaaagagcaccaccagcgatgccagaatacgccagctgcggcggccaaacagcgaaagaagacgtagtaaaaagaaggtcaccagtacggtggcggccagttcaacaacagcagaaatgcctttccagacggtaaaatcgtgcgcatagctgccgaagcggcggtaaaaaaccgcgccattcataaaaaggccaatatagattgcaagcaaaaagctcagcttctgctgtgtaatcgatttgatgtatctcatgcaaacaaaccctggacaaacaggtgataacaccctgcttagtggcttttcaggcccggcagggaaaaagtgcggaggtagtcagataagtaaaatctacacgcgcgaataagtagaccacagcaaagggaaaaagtgtggggaaagagtgtgcatgaagcacaaatttacaaaaatgcaagtttgaaaagagactttagcgttacaaaaagcagtaaaaagggccagttaattggcccaaattttacgagtcattgtttatacatttcgttgatgcgtttgatgcacacggaagctgaagcccagtagctcgcggctgagcattaaagggagccatgcgcctcacgcaacattttctgctctggctgacgaatcgtcgtagaaagcgccaatgacagaatcagcagggcgaaaatcacgtagaaggtcacatagaagccgccaaacagtgaggcgataatcgaaccacaaatgctaccgataccgaaaccgagataaatcacaccgtagtttttcgccaggttattgaggccaaagaactcactgaccagtgacggaaagacggtaatagtgccgccaaagttaaatgccacgcaggcaatcgctgcaaagaacgtcactgcattcaatggtgcaaacagcagggccgccatacccaccagcgatatcacctgaccaatggtaataacacggatacgggcgattttgtcagacagaatacccagcaccagacgacctgaaaggttggcgatggaaataacagtgactgcattggctgcggaaaccacatcaaggtgtgccagactttgggcgatatctttcgctaccccaatcacgtacaggccgctcatgcaggcggtcaggaacattaccgctaacatccagtactgcggtttacgcatcgactctgccagcgtgtaatctttctccaccacaccattgctggttttcacttcctgttttggtgcgtctttcattaacgttgcgccgaaaacaatcatcaacagcgcaatcgctccccaaatcacaaaggttttttccagaccgaccgtttccagcagctgcgtgtcgataaatttgaaacccaggctacccagaccataagaaccgatagcgaacgcggagatcagacctttacgctccgggaaccacttcacacagttagagagcgtcagcagataacccgcgccatctgccagtcccaccagcacaccggcgcttaaccacagcatcatcaggttgtcagaatgcgctgtcaggaagaagcctaatcccagcaaaatgccggaagccatggtgacgcgtttaacgccaaaacgttcctgtaatttgcccgcaacagaagacgaaattgccagccccagacttaacaagccgaaagagaaagcgacctggcttaccggcgcatccagcttggcggaaagcgcgccattaaacaggctccaggtataaaccgaccccagcgcaaactgggtaatgatagtaccgatgagtgtcagccagcgggtacgctgataatttgaaggtgtcatggcagtattcctgcagtaataaaaaggaaaaatctctgccgacaaccataacgaagtgcactttatgcctggggaaaaacggcatgaaatgccatcagaacggaatgaaatgccttagttcaggaatgaatgacgcgacaattattcaccaaatttattatttggtaagttagcacccactatcgccacaactattgttatttaatggtttcaattgtgactgttacgttaaaatctggcgctaacccccatcgtatacagatagtcgctattattagtggtattttctgcctgagttagcgcggcataggcggcaatattttgattgagcaacatatcagcgcctacggtgacatccagccagttgccgttctggtttgtcgccgtcatccggctcaggcctgattgcgccttccagatattctcgccaaattgctggttatagctgatttgcgcccagggtcggagatcgccaagccgggagtcaacacgccagcctaaggtactcacgcaggcatgccataacggatcggtcagcgtggtagtactgtcgccaaactcgttatacatcgaggtggttgtgccatcgtaatgtaatgccgcgaccgggccggttgtaacctgttcatataaaggaaaattccagcccatactcatactgctggtcacatccacaggggtttcttccgccagattgacttccagtcccagcgccctttggctactttgaatacgttgcgacaaaatatcgttgtaatcaggttgatgatcactatcccaggtgtaacgctctgtggaaagtccgggttgcgtatcaacgatatattcttgttgccaggcgtaagctgtgttgagaaaaaaggcactgattaccacgctcgccagcaggcttagctgccagcgaccaccgcttttttttatgatcattaacacgactccagggaagagccgaattcggcaatattattgtcattgtatgaaggatatcgggcatagtagccctgtattaaatattgactttttcaccgatgcgtcaagaaaagcggctgaaatttttacgatcgggtacatagcgagggaaagtatggaacgttgcggctgggtgagtcaggacccgctttatattgcctaccatgataatgagtggggcgtgcctgaaactgacagtaaaaaactgttcgaaatgatctgccttgaagggcagcaggctggattatcgtggatcaccgtcctcaaaaaacgcgaaaactatcgcgcctgctttcatcagttcgatccggtgaaggtcgcagcaatgcaggaagaggatgtcgaaagactggtacaggacgccgggattatccgccatcgagggaaaattcaggcaattattggtaatgcgcgggcgtacctgcaaatggaacagaacggcgaaccgtttgtcgactttgtctggtcgtttgtaaatcatcagccacaggtgacacaagccacaacgttgagcgaaattcccacatctacgtccgcctccgacgccctatctaaggcactgaaaaaacgtggttttaagtttgtcggcaccacaatctgttactcctttatgcaggcatgtgggctggtgaatgatcatgtggttggctgctgttgctatccgggaaataaaccatgattcgggaagcgcaacgttcagaactccccgcgatcctcgaactgtggctggaaagtacaacctgggggcatccctttataaaagcgaattactggcgtgactgcattccgctggtgcgggatgcctatcttgccaacgcgcaaaactgggtctgggaagaagacggtaagcttctcggttttgtcagcattatggaaggccgatttctggcagcgatgtttgtcgcaccgaaggccgtcaggcgcggtattggtaaggcgctgatgcagtatgtgcagcagcgccatccccacctgatgctggaggtttatcaaaaaaatcaaccggcgataaatttttaccaggcacagggttttcacattgtcgattgcgcatggcaggatgaaacccaactacccacatggattatgagctggccggtggttcaaacgctttaagtgtcagttccggaccgttgtatttttccagccatgccagcgccgtattacccgcacagccattccccagccgcgagctggggagatctttggtcagcacgttcactgcgccgtttttacaaataccgtcagcggttaaatccagatccggccatgccccttcgtgaatgcaaatcacgccaggtttaattccctcgctaatgaccgctccggcaagaatttgcccgcgtgcgttccacaaccgaacagtatcgccatcttgtatgccgcgctcctgggcatcgtcaggatgaatggtgacaggctcacgatttgccaccgcgtacaattcgcgcagagaactgtaattcagctggctgtgcaggcggtgcgccggatgggcagaaagtacctgcaactgttctggttcggcattgccctgccattcgtccggctccagccacattggatgcccagggcaatccgggtaaccgtaatcggcaatacgctgtgagaagatttcaatcttgccgctggcggtttttaacggatgcgccagcggatcgcggcaaaaatcagcgaagcgaataaaccgctcgctgtccgggttttccggcatctcaattaactggttggcttgccagaactcagcaaatggcggcaattcaacctgctggcttgccccgcgctgtcgggcaacgttataaaacgtttccagccattgcagctcactttttccttccgtaaaacgtgcataaccgcccttctcccagcgttcacttaactcggcaaaaacatcaaaatcattacgcgcttcatagcgtggcggcaccacttgcttcatcggcaccagatgctgattactgtaatcaccggtcatggtgagatcattacgctcaaaagaggtagtcgcaggcagaacgatatccgcgtgttttgccgccgccgtccagaagcattcagagatcaccaccagctccggtttttgccaggcacggatcaggcgattggtatcctgatgatgagtaaagttggcaccgcccgcccaccagataaaacgaatatccgggaaatgtcggttcataccgttgtgttgatatgcgccaccagggttttccagtgcttcaacaatgcgggcaacagggattttatccaccgcatcgcagccacccggcaagctgccctgcatggaagagagcaccgcagaacgccgcgtggggttaccaccattggcaaaatggtaagaaagaccaaaaccgccgccgggtgtgccgatttgccccaacattgctgccagcgtgacgatcatccagtgtttttgctcaccaaactgttggcgctgcattccccagcctgccatcagcatggtggtattttggtggaaaatagccgccagctcgcggattttcgctgcgccaacaccacaaatctctgctgcccattcggcggttttcgctattccgtcactctcgcccagcaaataagaggcgaagacggcataacctgtggtgcaacgcgccagaaacgcttcgtcgtgccaaccattttccaccagcgtatgggcgatccccagcatcagcgcaacatcggtgcccatgtgcggtgccacccactccattttatcgccaaagaaatcgacggtttccgatcgcattggatcaatgcagatcagctttttcccgctgtcacgcagtgcagaaaagtaagaaagcccctgctcatcggatgcattccacgcaattttcagcgtattgagtgggttagcactccacagcaccacgacatcgctatgttccagcaccagcggccaactggtctgctgttgataaacttcactaccacccacgacatacggcatgatcgcctgtgccgcgccggtcgaataatcccccagatgcccggtataaccgcctgccagcgccatatagcgttgtaataatgtcgaggccttatgcagcacgccgtttgaacgccagccgtaggaaccagcaaaaatcgatgccggaccataagcctcacgaatgcgtttatgttgttggtgaataagatccagcgcctcatcccaactcacgcgaacaaattcatcctgcccacgaatgccttgcgggttttccggtgacgcaagaaagccttttcgcaccattggaaatcgtacccgcgtattgctgtgaacctggtcgcgaaccgcgctctgcaaggagttttccattcctgtggctaacgcgccacgcgagctaaacacggtttcgccgtcggtttcaaccagcatgggcccccaatgggcggcagtcagaacggaatatcgtgaggatgagttggccaaaccgaagactcctgaaaggttagatgtattgagcagttaaatattacttacaaatttccgagtattcccaggaataatcttcatgttcacgcggcataatctcccgccacggaacccgtggcaaagaataaaaaggttattaaggattaacaatgaagaaacgtgtttatcttattgccgccgtagtgagtggcgctctggcggtatctggctgcacaactaacccttacaccggcgaacgcgaagcaggtaaatctgctatcggcgcaggtctgggctctctcgtgggcgcgggtattggtgcgctctcttcttcgaagaaagatcgcggtaaaggcgcgctgattggcgcagcagcaggcgcagctctgggcggcggcgttggttattacatggatgtgcaggaagcgaagctgcgcgacaaaatgcgcggcactggtgttagcgtaacccgcagcggggataacattatcctcaatatgccgaacaatgtgaccttcgacagcagcagcgcgaccctgaaaccggcgggcgctaacaccctgaccggcgtggcaatggtactgaaagagtatccgaaaacggcggttaacgtgattggttataccgacagcacgggtggtcacgacctgaacatgcgtctctcccagcaacgtgcggattccgttgccagcgcgttgatcacccagggcgtggacgccagccgcatccgtactcagggccttggcccggctaacccaatcgccagcaacagcaccgcagaaggtaaggcgcaaaaccgccgtgtagaaattaccttaagcccgctgtaatccctttcatgccaggtgatgcagaaatcacctggcattcttcagttttccttcatcatatttcaggctaaggtgatcgccttatcagtgaatggagagaagcatgaagccgtccgttatcctctacaaagccttacctgatgatttactgcaacgcctgcaagagcatttcaccgttcaccaggtggcaaacctcagcccacaaaccgtcgaacaaaatgcagcaatttttgccgaagctgaaggtttactgggttcaaacgagaatgtaaatgccgcattgctggaaaaaatgccgaaactgcgtgccacatcaacgatctccgtcggctatgacaattttgatgtcgatgcgcttaccgcccgaaaaattctgctgatgcacacgccaaccgtattaacagaaaccgtcgccgatacgctgatggcgctggtgttgtctaccgctcgtcgggttgtggaggtagcagaacgggtaaaagcaggcgaatggaccgcgagcataggcccggactggtacggcactgacgttcaccataaaacactgggcattgtcgggatgggacggatcggcatggcgctggcacaacgtgcgcactttggcttcaacatgcccatcctctataacgcgcgccgccaccataaagaagcagaagaacgcttcaacgcccgctactgcgatttggatactctgttacaagagtcagatttcgtttgcctgatcctgccgttaactgatgagacgcatcatctgtttggcgcagaacaattcgccaaaatgaaatcctccgccattttcattaatgccggacgtggcccggtggttgacgaaaatgcactgatcgcagcattgcagaaaggcgaaattcacgctgccgggctggatgtcttcgaacaagagccactgtccgtagattcgccgttgctctcaatggccaacgtcgtcgcagtaccgcatattggatctgccacccatgagacgcgttatggcatggccgcctgtgccgtggataatttgattgatgcgttacaaggaaaggttgagaagaactgtgtgaatccgcacgtcgcggactaagccgcgactgcgtagagtaaagcccgataatcgctcgggcttttactctttattgggttgcagtaactgctgtagtccaggcctgattaaacgcctgatgctgtgccggtaatggcgcaatcagtttgttatattcacttgcctgctgtgaagtcgggaactggatgccatttgcgacaaagctcacctgagtaccttgctgagcaatgtagtctccaaccatcaccagttgttgcgtgaaagtttgtgccgccggaatcaacggttgcaatgcatcagctggcgtcgttaccactttggtgaatgcctgatcaaagaccggtttcaaatcatcgctctgttttagcgcagagtgcgcagcatcggcctgcaacttcgcattttgcagttgttgcgccagcacacccagcgaaccgttcatttcacgcagcggaccgctttgcgtaacgtaatcctgcggtacgcgaattgcgttaacgctgtctacaaccgggcgcagaccggaatccatcgcctgattcacctgctgagaataaccatacagaatcgcgtaatcagagacaaaaggaccaaactgttttttctgatcggcagtcagggttggtagacgttcaccgctacgcatcactgtattctgcaggaagtcgataaacgctttacgctgatcgccttctttatcaaaacacccactcaggctaactaccattaataacgccgcaagaggcgcaaaccagcgagagcaggactttcctgtcgccattttcttactcctttcacccaaaaaaagcgcacaacgacacacgcgtgtctgacgtgacaaggatagtccaggacaggcttgcaggataccctttctacgtaatcttcctggtaaaatcatggagaaaatgaaacaaggttaatttgttgtttcattgttaaaaaatgatagtgccgttgccttttttgtagccagagatttacgccttcgcagaaggttagattttcgaaatctttacaaaacaggagtggtaagagatatatcggcatttatcagatcgttaggtggctataagtcacgctaaatgacaggctgaatcgaatcatagccagagcatgccctgacttcaccccgctgtgtctgcttttcccgactattcttaatgagcttcgatgcaattcacgatcccgcagtgtgatttgaggagttttcaatggaatataaagatccaatgcatgagctgttgagcagcctggaacagattgtttttaaagatgaaacgcagaaaattaccctgacgcacagaacaacgtcctgtaccgaaattgagcagttacgaaaagggacaggattaaaaatcgatgatttcgcccgggttttgggcgtatcagtcgccatggtaaaggaatgggaatccagacgcgtgaagccttcaagtgccgaactaaaattgatgcgtttgattcaagccaacccggcattaagtaagcagttgatggaatagacttttatccactttattgctgtttacggtcctgatgacaggaccgttttccaaccgattaatcataaatatgaaaaataattgttgcatcacccgccaatgcgtggcttaatgcacatcaacggtttgacgtacagaccattaaagcagtgtagtaaggcaagtcccttcaagagttatcgttgatacccctcgtagtgcacattcctttaacgcttcaaaatctgtaaagcacgccatatcgccgaaaggcacacttaattattaaaggtaatacactatgtccggtaaaatgactggtatcgtaaaatggttcaacgctgacaaaggcttcggcttcatcactcctgacgatggctctaaagatgtgttcgtacacttctctgctatccagaacgatggttacaaatctctggacgaaggtcagaaagtgtccttcaccatcgaaagcggcgctaaaggcccggcagctggtaacgtaaccagcctgtaatctctgcttaaaagcacagaatctaagatccctgccatttggcggggatttttttatttgttttcaggaaataaataatcgatcgcgtaataaaatctattattatttttgtgaagaataaatttgggtgcaatgagaatgcgcaacgccgtaagtaaggcgggaataatttcccgccgaagactcttactctttcaatttgcaggctaaaaacgccgccagctcataactctcctgtttaatatgcaattcacacagtgaatctcttatcatccaggtgaaaaataaaagcgtgaaacaaatcactattaaagaaagtaatctatatttctgcggcattcccagcctcctgtgttgatttccaacgagtatgtactgcacccattttgttggacgatgaaatggaatagcccctaatatgtcaaagccaaaatacccttttgaaaagcgccttgaagtcgtgaatcactacttcacaactgatgatggttacaggatcatctcggcacgttttggtgtcccccgaacccaggtcaggacatgggttgccctctatgaaaaacatggagaaaaaggtttaattcccaaacctaaaggcgttagtgctgatccagagttgcgtattaaggtcgtgaaagctgtgatcgagcagcacatgtcccttaatcaggctgctgctcactttatgcttgctggtagtggttctgtagccaggtggctgaaggtctatgaagagcgcggagaagctggtttacgcgcgctcaagattggcaccaaaagaaacattgcaatatcagttgatccagaaaaagcggcatcagcattggagctgtcaaaagaccgacgcattgaggatcttgaaaggcaagttcgatttcttgaaacgcggcttatgtatctaaaaaagctgaaagccttagctcatcccacgaaaaagtgaaagtactcaacgagctaaggcagttttatcctcttgatgagcttctcagggctgcggagataccgcgcagtacgttttattatcatctaaaggctctcagcaagcctgacaagtatgcggacgttaaaaagcgtattagtgagatttatcacgagaatagaggccgatacggataccgtagggtaacgctgtctcttcatcgagaagggaaacagattaaccataaagctgttcagcgcctgatgggaaccctctcacttaaagcagcgattaaggtcaagcgataccgctcttacagaggagaggtagggcaaaccgcccctaatgttctccaaagagatttcaaggctacgcggccaaacgagaagtgggttaccgatgttactgaatttgcagtcaatgggcgcaagctgtatttgtctccagtaatagatctcttcaacaacgaagttatttcttacagcctttcggaaagaccagtgatgaacatggttgagaatatgctcgatcaggcattcaaaaagcttaatcctcacgagcatcctgttctgcactctgaccagggatggcagtatcgtatgagaagatatcaaaatatccttaaagaacatggtattaaacaaagcatgtccagaaaaggcaattgtctggataatgctgtggtggagtgtttctttggaaccttaaagtcggagtgtttttatcttgatgagttcagtaatataagcgaactgaaggatgctgttacggaatatattgaatactacaacagcagaagaattagcctgaaattaaaaggtctgactccaattgaatatcggaatcagacctatatgcctcgtgtttaactgtccaactttttggggtcagtacaaactttgatttatagtcaggtggggcttttctctgtctgcctttcggtgaatacctgagacaaacagtctcaagcacccgtggctattctagcttaataagtttgtttcttctccttgatataatcctaaaaaaatctcataaaattaatatatgagataatctttattcagcagaagattattaaaggttgctgtattatttagcgataaaaaaagcctgccagatggcaggctatttaataacggcgttattattgcaacagcgaaatatccgcaacgcgcaggaacagttcgcgcagtttctccagcatggtcagacggttgatacgcaattctttgtcatcaaccatgaccatcactttatcgaagaaagcatcaaccggttcacgcagctcagccagttcgaccagcgcatcctggtaacgaccttccgtaaagtacggctccagcttgtcacgtagcaccacaacctgcatcgccagtttaatttcttccggctctttcagggtagaggcattcacgcggtcgctcagcacttcgtcagatttcgccagaatgttagatacacgtttgttcgccgccgccagtgcagcagctgcatccagggtacggaaatgcgataccgctttcatacgggcatcgaaatcagccggacgagtcggacgacgcgccagtaccgcctggatggtgtcaacggtataaccttcgtcctgataccaggcgcggaagcgaccgagcataaagtcgataacatcatcaactacgttggcattagtcagcttatcgccatacagacgcaccgcttcttcggtcagcgtttgcagatcaaggttgaggttcttctcaacgataattcgcagcacgccaagcgcggcacgacgcagcgcaaacgggtctttgtcgcctttcggatgctgaccgataccgaagatacccgccagggtatccatcttgtcagcaatcgccagcgcacaagctactgggttggacggcaggtcatcaccagcaaaacgcggctgatactgctcattcagcgccaccgcgacatcttccgcttcgccatcgtgacgcgcatagtgcatccccataacgccctgggtgtcggtgaactcgaagaccatgttggtcatcaggtcgcacttagacagcagacccgcacgggtagcgtggttaacgtcagcgccaatctgttcagcaatccagccagccagcgcctggatgcggtcagttttgtcgcgcagcgtccccaactgttgctggaacaacacggtttgcaggcgcggcaggttatcttcaagacgttttttacggtcggtgttgaagaagaactcggcatccgccagacgcggacgaacgactttctcgttaccggagataatctgctgcggatctttcgattcgatgttggcaacgaagataaagttcggcagcagtttgccgtcgttcgcatacaccgggaagtatttctggtcacctttcatggtgtaaaccagcgcttcagccggcaccgcgaggaatttctcttcgaattttgcggtcagaacgaccggccactccaccagcgaagccacttcttccagcaggctttcgcttaagtcagcgttaccgccaatcttacgcgctgcttcttcggcatcggctttaatcttcgccttacgttcttcgtaatcggcgatgactttcccacgctcacgcagaatttccggatactgatcggcgttatcgatggtgaattccggctcgcccataaagcggtggccgcgaatcacgcgatcggactgaatgcccagaatggttgccggaatgactttgtcgcccagcagcagggtcacggtgtgcaccggacgcacgaagtgcacgtcgcttgcgccccaacgcatcagtttcgggatcggcagtttcgccagagaagtcgcaaccatattcggcagcagtgcttcggtgctttcgcccttcacatgggcgcgatacagcagccattcgcctttatcggtagtcagacgctcagcctggtcaacggtaataccgcaaccacgcgcccaaccttctgccgctttgctcggtttgccttcagcgtcgaacgcctgggcaatcgccgggccgcgtttttcgatttcacgatccggttgcgcttccgccaggttagctactttcagcgccagacgacgcggagcagcaaaccattgaacggtgccgtgtgcgaggccagcgttatccagctccgcagtaaagttcgcagcaaaggactcagccaggctgcgcagtgcttttggtggcagctcttcagtgccgatttccaccagaaaagttttctcagacatagccgcctcttacttatctttgttgcacatcgggaagccgagggcttcacgggaagcgtagtatgcttctgccactgctttggtcagggtgcgaatgcgcagaatgtagcgctgacgctcggtgacggagatggctttacgcgcatccagcaggttgaagctgtgggcggctttcagaatacgctcgtaggctggcagcggcagcggattttccagcgccagcagctgctgcgcttctttctcgtactgctcgaagcaggtgaacaggaagtccacatccgcgtattcgaagttgtaagtggactgctccacttcgttctgatggaacacgtcgccgtaggtggttttacccagcgggccgtcgctccagaccaggtcgtaaacgctgtctacgccctgaatgtacatggccagacgttccagaccgtaggtgatctcgccggtaaccggtttacactccagaccaccaacctgctggaagtaagtgaactgcgtcacttccatgccgttcagccacacttcccagcccagtccccaggcacccagcgtcgggttttcccagttatcttccacgaaacggatgtcgtgaatagtcgggtccatgcccagctctttcagagaaccgaggtacagctcctgaatattgtccggcgatggcttaatgaccacctggaactgatagtagtgctgtaaacggttggggttttcgccgtagcgaccatcggtcgggcgacgagaaggctgaacataagcagccgccatcggttctggccccagcgcgcgcagacaggtcattgggtgagaggttcccgcgccgacttccatgtccaatggttgaacaatggtgcagccctggcgagcccagtaatcctgtaaggtcaggatcaagccctggaaggtcctggtatcaaacttttgcatattatttcgtgctggatacgtgtggatttaaaggaagggatcagtatacccgctggatggaagatatacagtacgaaacgggaaaaagcagggcttaacgcatggaaagatgcaaaaaatggccatccgcgtcaaaagaacagacaaactgctctttacggaaggtataaccgcgcatttcatagcttccctggaactgttcgaaggcggtgacgtcgattttttgctcgccggtgttataacgttttgccgcctgatccttgcataacgcttccatattcaacgaacgcagaggatcaacctttacccgttgtgctttctgcacgggtgacggtatagaacaacccactagcaccataagcgccattgccggaaagaaagcgttcatcatcattaaattaccgtctggtttgcaggtgagtcttattatttatatcggtatagtggctgatatcttacgaatttccttaagcctctataagctgtagtgataaaactcagattattccagtgcgccaaccaaatgatttatcggtcagactttttttaaccagatacagagacacagatgcagcccaaaatttactggattgataacctgcgagggatagcgtgtttaatggtggtgatgattcacaccactacctggtatgtgaccaatgctcatagtgttagccccgtcacatgggatatcgccaatgttctgaattctgcctctcgtgtcagcgtgccgctatttttcatgatttccggctatctcttttttggcgaacgcagcgcccagccgcgccatttcttgcgtatcggcttatgtctgattttttatagcgcaatcgcactgctctacattgcgctgtttacctccatcaatatggagttagcgctgaaaaacctgctgcaaaagccagtgttttaccacttgtggtttttcttcgcgattgcggtgatttatctggtttcaccgctgattcaggtgaagaacgtcggcggaaaaatgttgctggtgctaatggcggtgattggcattatcgctaacccaaacacagtgccgcagaaaattgacggttttgaatggctgccaattaacttatatatcaatggcgatactttttactacattctgtatggcatgttgggccgcgctatagggatgatggacacacagcataaagcactgtcgtgggtgagcgccgcgctgtttgcgacgggggtttttattatctctcgcgggacattatatgaattgcagtggcgcggaaattttgccgatacctggtatctttactgtgggccgatggtttttatctgcgcaatcgcgctattgactctggttaaaaacacgctggatacgcgtaccattcgcggacttggcttaatctcccgccattcattgggtatatacggattccacgccttgattatccatgcactgcgcacccggggaattgagcttaaaaattggccaatactggatattatttggatcttttgcgcgacgttggcagcgagtttgttactttctatgctggtacaacgaatcgacagaaacagattagtgagttaagtaaaagcccggtcacattggactgaccgggcttacgtgagttattcgctgtattcttcctgggtaacctgtgtttcttttggtgggtttattccggcatcacgaatatttttctgcaccgctactgcaccaaacaagcttaagaagaaagccagtccataaaaacctttttcgctgagtaataatgtcgcattccacagacctaccatcagtaatgcaacagagataataaagacagtcaggcaggtcatataataaatggaagtggtcggtatgccttcatacttgtcccgaacggtcttttgataagacgccgcagaaaacagtcctaataccagtacggcaaaataatatcctttttcatttaactgcatctctgcattccatagccctaacagataggtaacgataccaccaacgagagctatccatgacacaatactaaaggccggtgaataggttgatattttgttgtccatcacagtattcctttcattcctgaatatgtaagagctttatgttgctcatgccgagcgaaacaaacgcatttgaccaaacaagcagacaaaaaaggcgatgggatagatcaccatttcataagtattgataggtgcgtttaaaacaccgataaacaagagaccgatagtgattaacgcaactaactggcagatatgggtaaaaaaatcatccagttgcccgagtttttctgcgcgaagatatgcatagttgccaaaagttgctgtcattaacacgccaagaaaatagccttttccacttaacaatgggcatgagatccatagcccaaccagataaaccagcgccccgacaacaaataatagttttgccacagtctttgaggttttcataacgatctccatatctaccagcgatacattacgagtaaccaacgaaagacaaaactgaaaaatgccattaacaaatgattttcagaataaattcatactaaatattaattaattactgagatatatagatgtgaattatcccccacccggtcaggcaggggataacgtttacgccattaatggcagaagttgctgatagaggcgacggaacgtttctcgtcgtggctgataagcggcataacgctgcgcatctggtagatgcgactgttctaacggtagttgcggcaacaattcaatgagcgatttctctggattcgccgcgatctgcgccagccttgctgcgcccagtgctggccccacatccccccccgtacggtaatcgagctgctgaccgctgatatccgccagcatctgacgccagtactcactacgcgccccgcccccaatcaacgtaacactttgcggtttaataccgcaggcatgcacgacatccatgccatctgccagcgcataacccacgccttccagcactgctcgcgccagttcattggggccatgttgatgagtcaaaccaaagaaaacccccttcgcctggggattattgtgtggcgtacgctcgccggaaagataaggcagaaaccaaactggctcggcactttcatcagcctgttgagctgcagcgattaaagctgggacattgctcaggccggttaatttcgcggcccaatccagacacgacgctgcactcagcatcacagacattaaatgccaacgttgcggtagcgcatggcaaaagctatgtacggcgctttctggcttgcttaagaacccttcgctgacagcaaaatagacccccgacgtccccagcgataacattgcctgattagcatcaaccattcccacaccaactgcaccagctgcattgtcgccaccgcctgcgacaactggcaccgtcgccataccccacgctttcgcaacttcaggtaacaaagcaccagtaatttcgctgccttcgtataatgcgggcatctggtcacgagataagtcgcaagcctgcagcatgacgtcactccagtcacgctttgcgacatccagccacatggtgccagctgcgtcagacatatcgctggcaaactcccccgtcatacgcagacgcaagtaatctttcggtaataatactttgtcgatttgacggaatatctccggctcatgccgctgaacccatagcaatttaggcgcagtaaatccgggcatcatcaggttgccggtaatcacccgcgattgcggaactcgcgcttccagcaaagtgcactcttgcgcacagcgcccgtcgttccacaaaatggcagggcgtaacacccgttgctgagcatccagcaaggttgctccgtgcatctggccggcaatacccaatgctttaacgtcctgcagagaatgctgatcgcccagagctttcattgcgcgatcagttgcctgccaccactgttccgggtcttgttccgaccagagtggatgcgggcgcgaaacggtcagcttttccgtttgcgcagcaaccacctcaccctgctcgttgagcaaaataacttttacgcccgaggtgccaagatctatcccgatatacatatcgatcgttccttaaaaaaatgcccggtatcgctaccgataaccgggccaacggactgcacagttagccgttatttgtcgaacagataatggtttaccagattttccagttgttcctggcgaccactctgatgcaccggagacaaatgatgttcctgagcatatttggctaaatctgccagtgacatttggcctttcaggatttgctggcccaattcgctattccagccggaataacgctgcgcgatgcgtttatccagctcgccatcttcaatcatgcgcgctgcaattttcagcgccagtgccatcgtatccatcgcgccgatatgaccgtaaaacagatcatatttatcagtactttgacgacgtactttggcatcgaagttcagaccaccggtggtgaaaccgcctgctttgagaatttcatacatcaccagcgcattctcttccacactgttcgggaactggtcggtgtcccagcccagttgcgcatcgccacggttggcgtcgacagaaccgaacaggccaagcgcaatggcggtggctatttcatgatggaaagagtgacctgccagcgtcgcgtggttagcttcaatgttcagtttaatctctttttccagaccaaactgtttcaggaagccatagaccgtcgcggcatcgtaatcatattgatgtttggtcggttcttgcggtttcggttcgataagcaacgtgccctggaaaccgattttatgtttatgctcaaccaccatctgcataaagcggcccagttgttcacgctcctgacgcaagtcggtatttaacagcgtttcgtaaccttcacgaccgccccacaggacatagttttcaccgcccaatttatgggttgcttccatcgctgtaacaacttgcgttgccgcccagctgaagacttcaggatctgggttcgtcgccgcacccgcgccgtagcgagggtttgtaaagcagttggcggttccccacagcagcttcacgccgctctcttcttgcttgcctgccaggacatcaaccatttgcgcaaaattattgatgtactcttttaacgacgcgccctcaggggaaacatccacatcgtggaagcaataaaatggcacatgtaacttgtggaaaaactcaaatgcgacatctgctttacgcttcgccaacgccagtgcctcaccaggctgctgccacggacgattaaacgcccccacaccaaacatatccgccccgttccagcagaaggtgtgccagtagcaggcggcaaaacgcaagtgctcttccatacgcttacccaacaccagttcgtcgggattgtagtgacggaatgctaacgggtttgaggattttgagccttcataacgaacgcgatcgagctggtcaaaataggcttgcatattgaactccataatcaggtaatgccgcgggtgatggatgatgtcgtaatattgggcactccctttcagttgctcaattatgttatttcacactgctattgagataattcacaagtgtgcgctcgctcgcaaaataaaatggaatgatgaaactgggtaattcctcgaagagaaaaatgcaataagtacaattgcgcaacaaaagtaagatctcggtcataaatcaagaaataaaccaaaaatcgtaatcgaaagataaaaatctgtaattgttttcccctgtttagttgctaaaaattggttacgtttatcgcggtgattgttacttattaaaactgtcctctaactacagaaggccctacaccatgaaaataaagaacattctactcaccctttgcacctcactcctgcttaccaacgttgctgcacacgccaaagaagtcaaaataggtatggcgattgatgatctccgtcttgaacgctggcaaaaagatcgagatatctttgtgaaaaaggcagaatctctcggcgcgaaagtatttgtacagtctgcaaatggcaatgaagaaacacaaatgtcgcagattgaaaacatgataaaccggggtgtcgatgttcttgtcattattccgtataacggtcaggtattaagtaacgttgtaaaagaagccaaacaagaaggcattaaagtattagcttacgaccgtatgattaacgatgcggatatcgatttttatatttctttcgataacgaaaaagtcggtgaactgcaggcaaaagccctggtcgatattgttccgcaaggtaattacttcctgatgggcggctcgccggtagataacaacgccaagctgttccgcgccggacaaatgaaagtgttaaaaccttacgttgattccggaaaaattaaagtcgttggtgaccaatgggttgatggctggttaccggaaaacgcattgaaaattatggaaaacgcgctaaccgccaataataacaaaattgatgctgtagttgcctcaaacgatgccaccgcaggtggggcaattcaggcattaagcgcgcaaggtttatcagggaaagtagcaatctccggccaggatgcggatctcgcaggtattaaacgtattgctgccggtacgcaaactatgacggtgtataaacctattacgttgttggcaaatactgccgcagaaattgccgttgagttgggcaatggtcaggaaccaaaagcagataccacactgaataatggcctgaaagatgtcccctcccgcctcctgacaccgatcgatgtgaataaaaacaacatcaaagatacggtaattaaagacggattccacaaagagagcgagctgtaagcgttacgccccagcgcggagcgggggcgtgatttctctccatgccgcgtgaatgaattggcttaggtggagtcgttatgccttatctacttgaaatgaagaacattaccaaaaccttcggcagtgtgaaggcgattgataacgtctgcttgcggttgaatgctggcgaaatcgtctcactttgtggggaaaatgggtctggtaaatcaacgctgatgaaagtgctgtgtggtatttatccccatggctcctacgaaggcgaaattatttttgcgggagaagagattcaggcgagtcacatccgcgataccgaacgcaaaggtatcgccatcattcatcaggaattggccctggtgaaagaattgaccgtgctggaaaatatcttcctgggtaacgaaataacccacaatggcattatggattatgacctgatgacgctacgctgtcagaagctgctcgcacaggtcagtttatccatttcacctgatacccgcgttggcgatttagggcttgggcaacaacaactggttgaaattgccaaggcacttaataaacaggtgcgcttgttaattctcgatgaaccgacagcctcattaactgagcaggaaacgtcggttttactggatattattcgcgatctacaacagcacggtatcgcctgtatttatatttcgcacaaactcaacgaagtcaaagcgatttccgatacgatttgcgttattcgcgacggacagcacattggtacgcgtgatgctgccggaatgagtgaagacgatattatcaccatgatggtcgggcgagagttaaccgcgctttaccctaatgaaccacataccaccggagatgaaatattacgtattgaacatctgacggcatggcatccggttaatcgtcatattaaacgagttaatgatgtctcgttttccctgaaacgtggcgaaatattgggtattgccggactcgttggtgccggacgtaccgagaccattcagtgcctgtttggtgtgtggcccggacaatgggaaggaaaaatttatattgatggcaaacaggtagatattcgtaactgtcagcaagccatcgcccaggggattgcgatggtccccgaagacagaaagcgcgacggcatcgttccggtaatggcggttggtaaaaatattaccctcgccgcactcaataaatttaccggtggcattagccagcttgatgacgcggcagagcaaaaatgtattctggaatcaatccagcaactcaaagttaaaacgtcgtcccccgaccttgctattggacgtttgagcggcggcaatcagcaaaaagcgatcctcgctcgctgtctgttacttaacccgcgcattctcattcttgatgaacccaccaggggtatcgatattggcgcgaaatacgagatctacaaattaattaaccaactcgtccagcagggtattgccgttattgtcatctcttccgaattacctgaagtgctcggccttagcgatcgtgtactggtgatgcatgaagggaaactaaaagccaacctgataaatcataacctgactcaggagcaggtgatggaagccgcattgaggagcgaacatcatgtcgaaaagcaatccgtctgaagtgaaattggccgtaccgacatccggtggcttctccgggctgaaatcactgaatttgcaggtcttcgtgatgattgcagctatcatcgcaatcatgctgttctttacctggaccaccgatggtgcctacttaagcgcccgtaacgtctccaacctgttacgccagaccgcgattaccggcatcctcgcggtaggaatggtgttcgtcataatttctgctgaaatcgacctttccgtcggctcaatgatggggctgttaggtggcgtcgcggcgatttgtgacgtctggttaggctggcctttgccacttaccatcattgtgacgctggttctgggactgcttctcggtgcctggaacggatggtgggtcgcgtaccgtaaagtcccttcatttattgtcaccctcgcgggcatgttggcatttcgcggcatactcattggcatcaccaacggcacgactgtatcccccaccagcgccgcgatgtcacaaattgggcaaagctatctccccgccagtaccggcttcatcattggcgcgcttggcttaatggcttttgttggttggcaatggcgcggaagaatgcgccgtcaggctttgggtttacagtctccggcctctaccgcagtagtcggtcgccaggctttaaccgctatcatcgtattaggcgcaatctggctgttgaatgattaccgtggcgttcccactcctgttctgctgctgacgttgctgttactcggcggaatgtttatggcaacgcggacggcatttggacgacgcatttatgccatcggcggcaatctggaagcagcacgtctctccgggattaacgttgaacgcaccaaacttgccgtgttcgcgattaacggattaatggtagccatcgccggattaatccttagttctcgacttggcgctggttcaccttctgcgggaaatatcgccgaactggacgcaattgcagcatgcgtgattggcggcaccagcctggctggcggtgtgggaagcgttgccggagcagtaatgggggcatttatcatggcttcactggataacggcatgagtatgatggatgtaccgaccttctggcagtatatcgttaaaggtgcgattctgttgctggcagtatggatggactccgcaaccaaacgccgttcttgattttgataaaaattttctcaaagccggttacgtattaccggttttgagtttttgcatgattcagcaggaaaagaaccatgtttactaaacgtcaccgcatcacattactgttcaatgccaataaagcctatgaccggcaggtagtagaaggcgtaggggaatatttacaggcgtcacaatcggaatgggatattttcattgaagaagatttccgcgcccgcattgataaaatcaaggactggttaggagatggcgtcattgccgacttcgacgacaaacagatcgagcaagcgctggctgatgtcgacgtccccattgttggggttggcggctcgtatcaccttgcagaaagttacccacccgttcattacattgccaccgataactatgcgctggttgaaagcgcatttttgcatttaaaagagaaaggcgttaaccgctttgctttttatggtcttccggaatcaagcggcaaacgttgggccactgagcgcgaatatgcatttcgtcagcttgtcgccgaagaaaagtatcgcggagtggtttatcaggggttagaaaccgcgccagagaactggcaacacgcgcaaaatcggctggcagactggctacaaacgctaccaccgcaaaccgggattattgccgttactgacgcccgagcgcggcatattctgcaagtatgtgaacatctacatattcccgtaccggaaaaattatgcgtgattggcatcgataacgaagaactgacccgctatctgtcgcgtgtcgccctttcttcggtcgctcagggcgcgcggcaaatgggctatcaggcggcaaaactgttgcatcgattattagataaagaagaaatgccgctacagcgaattttggtcccaccagttcgcgtcattgaacggcgctcaacagattatcgctcgctgaccgatcccgccgttattcaggccatgcattacattcgtaatcacgcctgtaaagggattaaagtggatcaggtactggatgcggtcgggatctcgcgctccaatcttgagaagcgttttaaagaagaggtgggtgaaaccatccatgccatgattcatgccgagaagctggagaaagcgcgcagtctgctgatttcaaccaccttgtcgatcaatgagatatcgcaaatgtgcggttatccatcgctgcaatatttctactctgtttttaaaaaagcatatgacacgacgccaaaagagtatcgcgatgtaaatagcgaggtcatgttgtagcgatgatgagaattgtcggcgtcacatcaggtaacgctgcgtggttgtcggatgcggcgtgaacgccttatccgacctacccgccaggcatgataaaacgcaccaacaacgcttcaggctcgtagctcaactgcctgagacaaagtaaaaagccttatccgactgacaagtcggataaggctcaaggaaatgcaattacatatgcgccgcgattaaccgttggttatcctggtacattgcgaacaggtagttgttataactcttccctttggtcgagtagcccttcagcttgtgaatcatcgctgtggcagtcacttcctgatccgctttacgcagctgcgcacgcgatttacggaacgaagagtaagccgggtgcgtattcaggttagtgacataggcgctcaccgattctttgacagaactaaactgtgagtaccctttcactttacctggcgcattggtacaacgtcctttcatgcatttcatgccgaacaggttgttgttgttgcgcgccagcttcgacgttccccaaccgctttctgctgcagccatcgtcgccaccatactggtggggataatgtctacgcgttcaagcaaggtattccacgggatttttcgcgtattaccggaccacttcaccttgtagcgtttggcgatgtctttcagacgcgcacgctcagcaggtgaccattggccctgatactgttttgaaatgagccagttacgttccgcagtaatggccgcattttggctggtaatgtaaggcattacggtccggagaaacgcctttttccttggtgttccggaagggtattttcgcaaatcaggaagtgaactactctttgcactattgcgagaatactcttgtttactgcttacctgtttattactagctttagttaagtgggacttttgactcgctgttgttgtgtgcgtcttcgctaacacctcactcgaaaacaccagagtgagtaacataagaatcatcgccccatatcgtcgtatgggagtcaaaatcatcaggtctcctggtcggatttaatcattccaacaccttatatttttcacaaatttgagagttgaatctcaaatcatatcaaaaatagctgtcaagagcaccccaaggaatagtccaaatctgaaactatgtcacgtgttaacgattcagattggcgctaaatcgcagaaaatgtgggggttatcgcaaaattcagccgttttttgcgcgagatcgctcacccttgcttctcatcctgtggacttaccgctcagggatgagttttgtttggcttatcgctggcaaactgtctgaaatcgcagcaataaggactcatccgccatgaaactcgccgcctgttttctgacactccttcctggcttcgccgttgccgccagctggacttctccggggtttcccgcctttagcgaacaggggacaggaacatttgtcagccacgcgcagttgcccaaaggtacgcgtccactaacgctaaattttgaccaacagtgctggcagcctgcggatgcgataaaactcaatcagatgctttccctgcaaccttgtagcaacacgccgcctcaatggcgattgttcagggacggcgaatatacgctgcaaatagacacccgctccggtacgccaacattgatgatttccatccagaacgccgccgaaccggtagcaagcctggtccgtgaatgcccgaaatgggatggattaccgctcacagtggatgtcagcgccactttcccggaaggagccgccgtacgggattattacagccagcaaattgcgatagtgaagaacggtcaaataatgttacaacccgctgccaccagcaacggtttactcctgctggaacgggcagaaactgacacatccgcccctttcgactggcataacgccacggtttactttgtgctgacagatcgtttcgaaaacggcgatcccagtaatgaccagagttacggacgtcataaagacggtatggcggaaattggcacttttcacggcggcgatttacgcggcctgaccaacaaactggattacctccagcagttgggcgttaatgctttatggataagcgccccatttgagcaaattcacggctgggtcggcggcggtacaaaaggcgatttcccgcattatgcctaccacggttattacacacaggactggacgaatcttgatgccaatatgggcaacgaagccgatctacggacgctggttgatagcgcacatcagcgcggtattcgtattctctttgatgtcgtgatgaaccacaccggctatgccacgctggcggatatgcaggagtatcagtttggcgcgttatatctttctggtgacgaagtgaaaaaatcgctgggtgaacgctggagcgactggaaacctgccgccgggcaaacctggcatagctttaacgattacattaatttcagcgacaaaacaggctgggataaatggtggggaaaaaactggatcagaacggatatcggcgattacgacaatcctggattcgacgatctcactatgtcgctagcctttttgccggatatcaaaaccgaatcaactaccgcttctggtctgccggtgttctataaaaacaaaatggatacccacgccaaagccattgacggctatacgccgcgcgattacttaacccactggttaagtcagtgggtccgcgactatgggattgatggttttcgggtcgataccgccaaacatgttgagttgcccgcctggcagcaactgaaaaccgaagccagcgccgcgcttcgcgaatggaaaaaagctaaccccgacaaagcattagatgacaaacctttctggatgaccggtgaagcctggggccacggcgtgatgcaaagtgactactatcgccacggcttcgatgcgatgatcaatttcgattatcaggagcaggcggcgaaagcagtcgactgtctggcgcagatggatacgacctggcagcaaatggcggagaaattgcagggtttcaacgtgttgagctacctctcgtcgcatgatacccgcctgttccgtgaagggggcgacaaagcagcagagttattactattagcgccaggcgcggtacaaatcttttatggtgatgaatcctcgcgtccgttcggtcctacaggttctgatccgctgcaaggtacacgttcggatatgaactggcaggatgttagcggtaaatctgccgccagcgtcgcgcactggcagaaaatcagccagttccgcgcccgccatcccgcaattggcgcgggcaaacaaacgacacttttgctgaagcagggctacggctttgttcgtgagcatggcgacgataaagtgctggtcgtctgggcagggcaacagtaacttttccggcttcccgttcgtcagtacctcgggaagccgccaaccaggataaaatgtcagccctaatcagcgttgcaggataaagcaccgctcactcttcaacagaccgatttgcaccccagcaaatgtagcgttattgttaccttccttgctacagagttcgacagatatcccgctatgacattctccctttttggtgacaaatttacccgccactccggcattacgctgttgatggaagatctgaacgacggtttacgcacgcctggcgcgattatgctcggcggcggtaatccggcgcagatcccggaaatgcaggactacttccagacgctactgaccgacatgctggaaagtggcaaagcgactgatgcactgtgtaactacgacggtccacaggggaaaacggagctactcacactgcttgccggaatgctgcgcgagaagttgggttgggatatcgaaccacagaatattgcactaacaaacggcagccagagcgcgtttttctacttatttaacctgtttgccggacgccgtgccgatggtcgggtcaaaaaagtgctgttcccgcttgcaccggaatacattggctatgctgacgccggactggaagaagatctgtttgtctctgcgcgtccgaatattgaactgctgccggaaggccagtttaaataccacgtcgattttgagcatctgcatattggcgaagaaaccgggatgatttgcgtctcccggccgacgaatccaacaggcaatgtgattactgacgaagagttgctgaagcttgacgcgctggcgaatcaacacggcattccgctggtgattgataacgcttatggcgtcccgttcccgggtatcatcttcagtgaagcgcgcccgctatggaatccgaatatcgtgctgtgcatgagtctttccaagctgggtctacctggctcccgctgcggcattatcatcgccaatgaaaaaatcatcaccgccatcaccaatatgaacggcattatcagcctggcacctggcggtattggtccggcgatgatgtgtgaaatgattaagcgtaacgatctgctgcgcctgtctgaaacagtcatcaaaccgttttactaccagcgtgttcaggaaactatcgccatcattcgccgctatttaccggaaaatcgctgcctgattcataaaccggaaggagccattttcctctggctatggtttaaggatttgcccattacgaccgagcagctctatcagcgcctgaaagcacgcggcgtgctgatggtgccggggcacaacttcttcccagggctggataaaccgtggccgcatacgcatcaatgtatgcgcatgaactacgtaccagagccggagaaaattgaggcgggggtgaagattctggcggaagagatagaaagagcctgggctgaaagtcactaaaaattgcctgatgcgctacgcttatcaggcctacatgatttctgcaatatattgaatttggaagaatttgtaggccggataaggcgtttacgccgcatctggcataaacaaagcgcactgttccggcgttgagaaacgccggaaaacgtttcaaacaggctgctgccgtagccgatgccgctgcactttctcgacatccatgcactgcaacgcctttgtcgggcaggcttcaacacaggccggtcccgtctcccgatgccagcacagatcgcacttaatcgccctcgcctttttgcgcgaagaaacgacctccatcgcaccaaacgggcaagccagcatacagcttttacagccaatgcaacgtgtttgttcaacgaaaatatgcccatgttcgcggcttatcgcgtcaacagggcagacattcgcgcacggtgcatcttcacactgatgacaggctactgccgtggtccagcagtggtctttaatgacacgaatacgggaaataaactcgtctggtgacaacgcagcgcaatcctgattctcatgatgcgacactgcgcaagccacttcacaggtacggcaaccgatacatttcgtcgcatccgcaataataaaccggttcatgatcactcctttgcactaaaacagcagagtgccagagagcgcgtccctactgctttgatccaacgaaggaaatgttaaagttttggcacttgtccaaagcgttatgtgatcgcgcccaggtcatccctgacagtaaatcccagttcattagaaatagcctgcgcggtttcacgcagtggtttcaggagatttttctctcccacctgtttcagacgtgatgtcgaaagcgaaatcgacacggcgtacggcacccgcccatgaatatcaaacaccggaacagcaatacaggagacgccgagttcgttttcttctctgtccatcgccgctccgctttcacgaatgtgcgccagttcgtcgaacatcgcgggcagctcggtaatggtattgcgggttaacggctggatctcatgctgatggctttcccagtatgacttcacgtagtccgggtgaccaaacgccatgtagatcttgcccattgcggaacagtagagcggcatatgctggccaatataggcacgggttcgcagcatcccggttgtgggttccagcttataaatcaaaatagcgtgatcgtcttcgcggctggagaagttaatggtttcaccagtggcgatgttcagtgcctcaagatgcggagcggcgatatgaatgatattcagcgaagacagcgccttctgcccgacggcaataaatttggtggtcaggcgataactccctgcggcaggcgcggtggtcacatagccgcaggactgtaatccctgcaataagcgatggacggtactcttatttaaaccagccagctccgaaagatgcgccaacggacaaccgtttggatagttgctcaaaatctcaatcagcatcaacccgcgaaacagactctggcttccggctggacgctctttttcctgcgccatctcgttctctttttttcccatcacttctttccccattttgtcgcgtcctgatggtagcgcaaagtgtgccgtagttcacgatctcgacagataatttataaccaattgatttttatgtcttttgaaattcatcaatcagattgctttgttaaaaagtgatcgatatatttgaaatcaagtttcgcatattgaaattttaagccaaaaaagcgatcaaaaaaacaaggaagcctgggatgaaagtgacatttgagcagttaaaagcagcctttaatcgggtcttaatttcacgcggcgttgacagcgaaacggctgacgcctgtgcagagatgttcgcccgcaccaccgaatccggcgtttattctcacggcgttaatcgtttccctcgtttcattcaacaactggaaaacggcgatatcattcctgatgcccaacccaaacgtataaccagcctcggcgcaattgaacagtgggacgcccagcgttcgatcggtaacctgacagcgaaaaagatgatggatcgcgccattgaactggctgccgatcacggtattggtctggtggcactacgtaatgccaaccactggatgcgcggcggcagctacggctggcaggcggcggaaaaaggctatattggcatttgctggaccaactccatcgccgtaatgccgccgtggggcgcaaaagagtgtcgcatcggcactaacccgctgatcgtcgccattccttccacgccgatcaccatggtcgatatgtcgatgtcgatgttctcttacggcatgttagaagttaaccgtctggcaggtcgtcagctcccggtcgatggtggctttgatgatgagggcaatttgaccaaagaacctggcgttatcgagaagaatcgccgcattttgccgatgggctactggaaaggttctggcatgtcgattgtgctggatatgatcgctactctcctttccgacggcgcatccgttgccgaagtcacccaggacaacagcgacgaatacggcatttcacaaatttttattgccattgaagtggacaagcttatcgacggtcccacccgcgatgccaagctgcaacgcatcatggattacgttactagtgccgagcgtgctgacgaaaatcaggccattcgcttacccggccatgaatttactaccctgctggccgaaaaccgccgtaacggcatcactgttgatgacagcgtgtgggccaaaatccaggcgttatgaggagataagtcatgatttttggacatatcgcgcagcccaatccgtgccgtttgcccgccgccattgaaaaggcgctcgattttctgcgcgctaccgatttcaacgccctggagccgggcgttgtcgaaatcgacggcaaaaatatttatacgcaaattatcgatttaaccacacgcgaagcggtggtaaaccgtccggaagtgcatcgtcggtatatcgatattcagtttctggcgtggggcgaagagaaaatcggcattgctattgatacgggaaataataaagtcagcgaatcactattagagcagcgcaatattattttttatcacgacagtgaacatgaatcatttatagaaatgataccgggcagctacgcaattttctttccgcaggatgttcaccgaccaggttgtattatgcaaacagcctctgagatacgaaaaattgtggttaaagtcgcattaacggcgctgaattaatcgaataatcgtctacgccagaacgcctgggtaatgttattgctctaactatattaataattcaggttgctgcacatgcgacttgaattatgacagacatagcctcaaggaatagctatgaaaaaaatactcgaagcaatactggcgattaatctcgccgtactttcctgtattgtatttataaacattattttaagatatggttttcagacaagcattttatctgttgatgaattgtcacgttatttatttgtctggttaacgtttattggcgcgattgtagcttttatggataacgcccacgttcaggtcacctttctggtggagaaactctcccccgcatggcagcgacgagtcgctctggttacccattccttaatcttatttatttgtggcgcactggcctggggcgcaacgctaaaaacaattcaggactggagcgattattcaccgatcctcggtttacccatcggcctgatgtatgccgcttgtctgcccaccagcctcgttatcgcattctttgaactgcgtcatttatatcaactcatcacgcgtagcaattctctaacgtcgccaccgcaaggagcttaatcatggctgtgctgatttttctgggctgtctgttgggtggtattgctatcggtttgcctattgcctgggcactgttgttgtgcggggcggcgttaatgttctggctggacatgtttgatgtccagatcatggcacaaacgctggtgaacggagccgatagcttctccctgctggcgattccgttctttgtgctggcgggtgaaatcatgaatgcgggcggcttgtcaaaacgcattgttgacctgccgatgaaactggtggggcataaaccaggcgggctgggctacgtcggcgtgctggcagctatgattatggcgagcctttctggttctgccgttgcggataccgccgccgttgccgctctactggtgccgatgatgcgcagcgccaactatccggtcaaccgggcggcggggctgattgcctctggcggcattatcgcgccaattattcccccttccattccgtttattatcttcggcgtttccagcggattatccatcagtaagctgtttatggcgggcattgcccctggcatgatgatgggcgcaacgctgatgcttacctggtggtggcaggccagtcgccttaatttaccccgccagcaaaaagcaacgatgcaggaaatctggcactcttttgtctccggtatctgggcgctgtttcttccagtcatcattattggcgggtttcgctccggtctgtttacccctaccgaagccggggccgttgctgctttctatgcgctgtttgtcgccacagttatttaccgtgaaatgaccttcgccacactttggcatgtactcattggcgcggcgaaaaccacctcagtggttatgtttctggtggcctcggcacaagtttccgcctagctgattaccattgctgaactgccgatgatggtttctgatttactgcaaccgttggtcgattcaccgcgtctgctgtttatcgtcattatggtggctatcctgattgtcggcatggtcatggatttaacgccgacggtattaattcttaccccggtattaatgcctttagttaaagaggcaggaatcgatccgatttatttcggtgtcatgtttatcattaactgctcaatcggcttaattacaccgcctatcggtaatgtacttaacgttatttcaggggtggcaaaactcaaattcgatgatgcagtcagaggcgttttcccttacgtcctggttttatattcattattagtcgtatttgtttttattcccgatctcatcatcctccctttgaaatggattaattaaaaggaaaatattatgaaattacgctctgtaacctacgcattattcattgctggcctggctgcattcagcacatcttctctggcggcacaatctttacgtttcggttatgaaacatcacaaaccgactcgcaacatattgcggcgaaaaaattcaatgatttattgcaggagagaaccaaaggcgagctgaaattaaaactgttcccggacagcactctcggtaacgcgcaggcgatgatcagcggcgtacgtggcggcaccatcgatatggaaatgtccggctcgaataactttgccgggttatcaccagtgatgaacttgcttgatgtccctttcctgttccgcgataccgctcacgcgcataaaacgctcgacggcaaagtcggtgatgatctgaaagcctcacttgaaggtaaaggactgaaagtactggcctactgggaaaacggctggcgcgatgtcaccaactcgcgcgcaccggttaaaacccccgccgacctgaaagggctgaaaatccgcaccaacaatagcccgatgaatatcgccgcattcaaagtctttggcgctaacccgatcccgatgccgtttgccgaagtctataccgggctggaaacccgcactatcgacgctcaggaacacccgatcaacgtcgtctggtcagcaaaatttttcgaagtgcagaagttcctttctctgacgcaccacgcctattccccgcttctggtggtgatcaacaaagcgaagtttgatggcttaagtccggagttccagcaggcgctagtttcatctgcacaagaagcgggtaactatcagcgcaaactggttgctgaagatcagcaaaaaatcatcgacggcatgaaagaagcgggcgtggaagtcatcaccgatctcgaccgcaaagcctttagcgacgcactggggaatcaggttcgcgacatgtttgttaaagatgtgccgcagggagctgatctgctgaaagccgtggatgaggtgcaataaaccatgacgcaatactggctggggttagattgtggcggtagctggctgaaagccgggctgtatgaccgcgaaggccgggaggcaggcgtgcagcgcctgccgctgtgcgcattaagcccgcagccaggctgggcagagcgcgatatggcagaactgtggcaatgctgcatggctgtcattcgcgccctgcttactcattctggtgttagcggggaacaaattgtcggtatcggcatctccgcacagggaaagggcttgtttttgctggataaaaacgacaaaccgctcgggaatgctattttgtcctcggaccgccgggcgatggaaatcgttcgtcgctggcaggaagatggcatcccggaaaaactctacccgctgacccgacaaaccttgtggaccgggcatccggtgtcgctgttacgctggctgaaagagcacgaaccagaacgctacgcgcaaattggctgcgtgatgatgacgcacgactacctgcgctggtgtttaactggcgtcaaaggctgtgaagagagcaatatttccgagtccaacctctacaacatgagtcttggggaatatgacccgtgcctcaccgactggctggggatcgctgaaatcaatcacgccctgccgcctgttgtcggatctgccgaaatctgcggggagatcaccgctcagacagccgccctgaccggtctgaaagcgggtacgcccgttgttggcggcctgtttgatgtggtttccaccgcactctgcgccgggatcgaagacgaatttaccctcaatgcggtgatggggacctgggcggtgaccagcggcataacccgcggtttacgtgacggtgaagcgcatccgtatgtctatggtcgctacgttaacgatggtgaatttatcgttcacgaagccagccctacctcttccggcaacctcgaatggtttaccgcacagtggggagaaatctcgtttgatgagatcaatcaggccgttgccagcttgccgaaggctgggggcgatctctttttcctgccgttcctgtacggcagcaacgccggactcgagatgaccagtggtttctacgggatgcaggccattcacacccgcgcgcacctgttgcaggccatctatgaaggggtggtgttcagccatatgacccacctcaaccgaatgcgcgaacgttttactgatgttcacaccctacgcgtcactggcggcccggcgcactccgatgtctggatgcaaatgctggcggacgtcagcggtctgcgtatcgagctgccgcaggtggaagaaaccggctgctttggtgcggcccttgccgcccgcgtcggcaccggggtttatcacaacttcagcgaagcccaacgtgacttgcgacacccggtgcgcaccctgctgccagatatgaccgcccatcagctttaccaaaaaaaatatcaacgttatcagcatctcattgccgcacttcagggctttcacgcccgcattaaggagcacacattatgagccgaccacttctgcaactggccctcgaccactcatcacttgaagccgcgcagcgcgacgtgacgctgttaaaagacagcgtcgatatcgtcgaagcgggcaccattctctgtttaaacgaagggcttggcgcggtgaaagccttgcgcgaacagtgcccggacaaaatcatcgttgctgactggaaggtcgccgacgctggtgaaacgctcgcgcaacaggcgtttggcgcaggcgctaactggatgaccatcatctgcgccgcgccgctcgcgacggtagaaaaaggccacgcaatggcacaacgctgcgggggtgaaattcagatagagctgttcggtaactggacgctggacgacgcccgcgactggcatcgtattggcgtgcggcaggccatttatcatcgcggtcgtgatgcacaggccagcgggcaacagtggggcgaagccgatctggcacgcatgaaggcgctttcagatatcggccttgagctttccattactggcgggattacccctgctgacctgccgctgtttaaagatatccgcgtgaaagcgtttattgccgggcgggcactggcaggcgcggcaaatccggcgcaagtggctggcgatttccatgcgcaaatcgacgctatctggggaggtgcgcgtgcgtaatcatccgttagggatttatgaaaaagcgctggcgaaagatctctcctggccggagcggctggtgctggcaaaaagctgcggttttgattttgtcgaaatgtcggtggatgaaaccgacgaacggctctcacgtcttgactggagcgccgcacaaaggacttcgctggttgccgcgatgatcgaaacaggtgttgggatcccgtcgatgtgcctgtccgcacatcgtcgctttccctttggtagccgtgacgaggcagtgcgcgaacgggcgcgggaaatcatgagtaaagcgattcgcctggcgcgcgatctcggcattcgcaccatccagctggcaggttatgacgtctattacgaagaccacgacgaaggcacccggcaacgttttgctgaagggctggcgtgggcagtcgaacaggcggcggcatcacaagtaatgctggcggtggagattatggataccgcgtttatgaactccatcagcaaatggaaaaaatgggacgagatgctcgcctcaccgtggttcaccgtctacccggacgtcggcaacctcagcgcctggggcaatgatgttcccgccgaactgaaactgggcattgaccgtatcgccgcgatccacctgaaagacacccagccagtcaccgggcaaagtcccggacagttccgcgacgtgccgtttggcgaaggctgcgtcgatttcgttggcatcttcaaaacgctgcataaactgaactatcgcggttctttcctgattgagatgtggaccgaaaaagccaaagagccggtgctggagattattcaggcgcggcgttggattgaagcgcgtatgcaggaggctggatttatatgttagagcaactgaaagccgacgtgctggcggcgaatctggcgcttcccgctcaccatctggtgacgttcacctggggcaatgtcagcgcggtagacgaaacgcggcaatggatggtaatcaaaccttccggcgtcgagtacgacgtgatgaccgccgacgatatggtggtggttgagatagccagcggtaaggtggtggaaggcagcaaaaaaccctcttccgatacaccaacgcatctggcgctctaccgtcgctatgccgaaattggcggtattgtgcatacccactcgcgccacgccaccatctggtcacaggccgggctggatctccccgcctggggcaccacccacgccgattatttttacggtgccatcccctgcacgcgacagatgaccgcagaggagattaacggcgaatatgaatatcagaccggcgaagtgatcattgaaaccttcgaagaacgtggcaggagtccggcacaaatcccggcggtgctggtgcattctcacggcccgttcgcatggggtaaaaacgccgccgatgccgtgcataacgccgtagtactcgaagaatgcgcctatatgggtctattctcgcgccagcttgcgccgcagctccctgcgatgcaaaacgaactgctggataagcactacctgcgtaagcatggggccaatgcctattacgggcagtaatccctcacgccggggcttcatcgccccggcactacgaattgatatgttccttgctgtaacgccgcttccacgctgctggcgttaaaccagtatgtttctgaaaaatctgccggaaatagccaacgtcattaaaccgtattgcatggagcaggccgacaacgtcgagtcactgcataacctgttgctgcccgccgatgcgccatttacgacatttgaaggcaagggattgttcagccataagatcctgattcagacgccaggttcccggtatgaacagagcaatccagagcaacaacctttgtggcattacgacggagcaccagccgcaccgacatccaccggtgaattaaaaacgccagctcaccccggtgacaaaggtaaaactctcattacgatcaatcatcgggctgtcggtaatctcttccggcagctcgctgtatcctgcgctcgccatcaatacgacgtgctctcctatcgggtattttgccgtcaggctgacatagggcacccaggcatcctgcgcggaataacttgccagaccgctacgacgggactcactctctgaaatgccatagtaatagtcactgaaattctcgtcataatagagaacgcccagcgcaggtgtcagcgacagacgacctatctgcattttgtggaataccgatagctcccccacccagccgttgctgttatccagaacgtccgcagctgcagaggctttcacggttccccaacgctcgtggtgataccaggcaacccccgccatagccgtactatcacgcttatcaagctgttgcatggcataatcgtcattatcggtagggtcaaattccagcggcatccaggatgcggtcaggctaagttcatttttttcactttgcgacagaataaaacctaacgtggtctgacgaacataaaaagtatcaccttcataactaatcagcggaattgccttcgtattttcattataaccgcgataaggcgattcattataagccgcaccagcaccaatggataattcagaagcagttgcgcttgccataaaaggcaacgcaaataacgccacaatattgcgattaattaacatgtccggtattccattttaaaataagataagaaagagtcggcataataatgcttacaatttctccggtgcaagattcatatttatatagtaatatataaaattatatataattgggctgttgcgatgacaaaattacaacttaagtaccgggagttaaaaattatctcggtaatcgctgccagtgaaaatatcagccatgccgcgactgtacttggcatcgcacaggccaacgtcagcaaatatcttgctgattttgaatcaaaagtgggtttaaaagtctttgaccgaaccacccggcagctgatgctcacaccttttggcaccgcgctgttaccgtacatcaacgacatgctggacagaaacgagcaacttaataattttattgcagattataagcatgagaaacgtggtcgggtcaccatctacgccccaaccggcataattacctatttatccaaacatgtaatcgataaaattaaagatatcggtgatatcaccttatcgctaaaaacctgcaatcttgagcgtaatgccttttatgaaggcgtcgaatttcctgatgattgtgatgttttaatcagctacgctccaccaaaagatgaatcgctggttgccagttttattacccaatatgccgtaaccgcttatgccagccagcgctatcttgagaaacatcccattagccgtcctgacgaactcgaacatcactcctgtattttgatcgactcgatgatgatcgacgacgcgaatatctggcgcttcaacgtcgccgggagtaaagaggtgcgggattatcgcgtgaagggaaattacgtttgcgacaacacgcaatctgcgctggagctggcacgaaatcacctggggattgtgtttgcgccagacaaaagtgtgcagagcgacctgcaagacggcacgctggtgccctgctttcagcaaccctatgaatggtggctggatctggtggctatcttccgtaaacgggaataccagccctggcgggtccagtatgtgctggatgaaatgctgcgtgaaattcgccaccagcttgctcagtcgcagcaactgcggcctgaacaagcggcggaaagcgaagattaatgatcgagataaaggtaatgcacccagctggtcatgcgtaatagcactttgcgcatcaccgagacatggctgaaatgatcagagtaaaccgccacctgggcgtaaataccgtctggtaaagcgctcaaatcagtgtgctcatccagttcaatggtcgcgataacgccatctgaacccggcgctgtgtttaacgtctgtaaggtgccggtcgactgataagctccgccgggaacggctggactaatggctgccagcttaccgctgaataccttacctggcagagcattaaacaccacttccgcatcgtcgccaggagccagtcgcagcaaggagttctgacggaactgcgccacgatttgtcgtttctgatcgggtataaacaccatcaccggacgtagcggcagcgacgcggcataggtacccggacgaatcagtacctgggtcacataaccatcgctcggcgcacgcactatcgtctgctcaaggttatattttgcttccgcgagctgtgctttcaggctggcgatttgagaatgttcacccaacaccaggctatccagctggctctggatctgtttttgttccgccgccgatgacttcacggaggcttcctgcgccagataattttgccgcgccacatcgatatcgcgttctgaaaacgggtttactttcgcctggctgccacgtgcgtaacgctgatactctttagcgaatttatcccgcgtggcctttgcctgctgagtattcgccgccatctcatctaactctgcgcccaacgcccgctgtttatgttctgcggtaacgatatccgccatcagccgatccacccgcgcctgataacgcgtcgggtccagtcgaaatagcacctcaccttttttaatcagcgtatttttcttatccgtcacttcaatcaccacaccagtcacctgtgggacaacaggaatagaaataaccgctttttgcgctttaaaggtatacggatggttatagttcattaacagaattagaccgctgacaataaatattccacccagggccgctgtgggaatggtccatttatttacgggaattttgaagatcttaaacattgcccatgcaaaagccacataggtcaaaataatcagtaaatccataagtattactcggcagaagaggatttgatgtcggcgagctgtttctccagcccggcaatgcgctgttgcagttgcataacggatgaatcatggctttgcattccccatccccgctccgggcggtaaagcgtggcccaaatccacaaaaacggccagataacatgtaacgtaaaaagactcacccaaccagcaacatgaatggcgtcggcatgaggatgattacgttttttggcaatcaggtagggaatatcatgtaaaataatgatcccatagaagatcaccagaaatacaaaaataagcactcccagtgcaaaatagtccaggaacatatttccctcaaagaatataaaaaagaacaattaacgcatattatgaaatgccatgatgcagtgcaatttccttatttatataacgacatattgttttttatatactttcttaaatgtgttgtctggtttttcaacaggacgaggtttatcatattgaaatagtggaactattggccaaactaatgaataactccagtaaaacatccacagtacagattaagcgtattaaaccttcaattatctaccgtttattgctgattggcctcggatcaccaatggtgatttacggcctggttcgcccgctcaccatcgaaacgcgagattaaactcctgacaaaacacgccccagaaacgtacttctgttggcgtagtctgggttattgcgcacgtaggtttaaaacgtaaattgtaacaacgtgcgctttgtttatgccggatgcggcgtgtacgccttatccggcctacggtcaggttcccgtaggcatgataagacgcgtaagcgtcgcatcaggcaatgaatacccaatgcgaccagcttcttatatcagaacagccccaacggtttatccgagtagctcaccagcaggcacttggtttgctggtaatgctccagcatcatcttgtgggtttcgcgaccgatacctgattgtttgtagccaccaaacgccgcatgtgccgggtaagcgtgataacagttggtccacacgcgcccagcctgtatgccgcgccccatcttataggccagattaccgttgcggctccagacgcccgcgcccaggccatattgcgtatcgttcgccagctccagcgcttcttccatcgttttgaaggtggtcaccgccagcaccgggccaaaaatctcctcctggaacacccgcatattgttctgaccaaacagaatcgtcggttcgaggtagtagccgtctttcagttcaccttccagcagcttgcgccgcccgcctgtgagcacgtcagcgccctcttttttaccgatatcaatgtagttgaggatggtttccagttgcccgtgagaaacctgcgcgcccatttgcgtcacgctgtcgagcgggttaccgctacgaatgctttcgacacggcggatggcgcgttccataaagcgttcgtagatagattcctgcactaaagcacgactcggacaggtgcaaacttcgccctggttaaaggcaaacagtgcaaagccttccagcgctttatcgaaaaaggcatcttcttcatccatcacatcagcaaagaagatatttggcgacttaccgcccaactccagcgtcaccggaataatgttttgcgttgcgtattgcataatttgttggcccacttccgttgagccggtaaacgccactttggcgatgcgtttcgaggtcgccagatattcgccaattaccccacctgcgccattgaccacgttcaccacgcccggcggcagtaaatcaccgacaatttccattagcagcagtacagaaagcggggtaagacgtgcgggtttcagcaccacacagttgcccgccgccagcgcgggagccattttccagctcgccatcagcagcgggaagttccacgggataatctgccccaccacgcctaacggttcatggaaatgataggccacggtttcgctatcaacttcactgatcccaccttcctgcgcccgaatacacgaggcgaaatagcggaaatggtcaatcgccagcggtacatccgcagcactggtttcgcgaatgggtttgccgttatcccaggtttcagctgtcgctaacagctcgaggttttgttccattcgatcggcaatcttaaacagaatcgccgcacgatcctgcaccgaggtgtgcgcccatttatctttcactttgtgcgcagcatccagcgccagatcgatgtctcgtttgcccgaagacgccacttcgcacagcagctgcccggtcaccggcgtcagattctggtaatactcgccgtcggcaggggctacccattcgccgccaataaagttgtcatagcgggcttttaacttgagggggaaaccatactcgccgggcttaatctgtgctgaagggggattattggtcatgatcgtctccttgcggtgtgaggtataacaagggtagacgtgactggcgaaatcttcgccagtcggtaacagctttacgacagctatcacgaatttacgggcaagggttacagagatagttgaaaaagcggctgacaatttgccagccgttgtggaaatgatgattacatcgctgcgcgataaatcgccacaatttcttcgtgagttgcctggatcgggttagtaaagccacaggcatctttcagggcattagtcgccaataccgcgaaatcttcttctttcacgttcaggtcgcgtaggcctgccgggatatccactttcttcgccagttcacggatggcgttaatgcaggcttcagcaccttccgcgtcgtttttacctgtcacgttcacgcccattgcagcggcacagtcacgcagacgtgcagcggcgactttgctgttgaatacctgaacgtgcggcagcaaaacggcgttacatacaccgtgtggcaggttgtagaaaccgcccagctggtgcgccatcgcatgaacataacccagagaagcattattgaacgccataccggcgaggaactgggcataagccattgcttcacgcgctttcgcattactgccatcttcaacggctaacggcaggttttcggcaatcatggtcacggctttcagtgcacaagcgtcagtgatcggcgtggcggcaatagaaacatatgcttcgatagcgtgcgttaaggcatccatacccgttgcggcggtcagtgacttcggcataccaatcatcagagaggagtcattgacagaaagcagcggagtgacatgtttatcaacaatcgccattttgatatgacgcgcttcgtcagtgatgatgcagaaacgggtcatttcagaggccgtacccgccgtggtattgatggcgatcatcggcagctgcggttttgcagagcggtcaacgccttcgtaatcgcgaatatcgccgccattggctgccaccagcgcaataccttttgcgcagtcgtgtggagaaccaccgcctaaggagatcacgctatcgcaattattctctttaagtaatttcaaacctgcggcgacgttttccgtggtggggttaggttgggtgccatcataaataacgctaaaaatattgcgttcttccagtgctttttgcacatcgcccgccatacctaatttcgttaacatattgtcagtgacaattaaggtacgggtaaatccataatctgccatcatattcattgcatcagtcaatgaatcagcgccgatgacattcacagaaggaataaagaacgttgaagctgccataacacactcctgaaagtgtaaaaaagggcgggcagcttactgaggattttcattcgaaaatatgatcagtattattgattatcaaaattaatctaataaaaagcacattgtattcattaaacaatgtgctttttttaaatcataagaattttgtattaatttattttaaaacttaattaatcatttccttatttttccggaaataataatgcgtcgcgcaataaatgatcatttccacgacgacgcgtaaagccaatgcggtcaaaatattccagaatctgaattgccagctttcggcctacgcctaagcgatcgcggaaatccgccgcgcaggttgaaccacactcctgatcgagatcgcggatcatattggcaaactcgacaatccgatcgttacggtaataacgatctttaacgatcgcggtaattattccttgctgcgccgcctggcgtagagtcaggcgcattgcctgctcgtcggttcccgtctcttttgccaggtcacgcacccaccacggttcgtcaccaaacagtggctctgctttttgccagatggcctgctgctcttcgctgaagcccgctttgtgatctggcagatgcagccagccgtgatggctgtggatgtcgccgctttcgcgcatcttttcaatcagcaacagtaccagcgcttcatcttccattggcaacgccatacgtcgcagacgttcgcgcccagggccaggttcatcgcgatgttgctcatgataagtcgctaatgtgtcgagaattttccgctgccagcgggcggcaaccggcgcattcaacaagctataaccagcctgaatataaccaggctgttgcagcaattcgcgcatcccttcgccgttgagctggcgcgcccaggcgaaatccgcaaggttaaccgcgccgcgttccagatgaacagataacgcatcggcatcgctctgcgcccgtgcaagagacgccagccattgcagatattccggcttacgtttaccgcgacgcggcgggttaagcatcacgacgcgcgctccggccagcgtgttgcgggcagagatatcgcgcaataccaggcggtcgttatctgccagccataacggggtgtcgaagaccagttcagcaaggttatcttccagcagtgaaacgcgtcccgtgacgtggctggcggcgtggtgaatatgcagcggctgccactgggtcagcggtgtatgggtttgaagctcgacaatcacccgtgtgaacggctctggcggcacatcggcaagcagccagtcgccacggttaatctgctctttttccgcatcacccgcgatgttaagcgcgatacgctgcccggcattggcggtttctgttggctggttttgcgcatgcagcgcacgtacacgcatcggtttatttacaccagtcagccagagtgaatcgcctaccttcacttccccgcttaacgccgtaccggtgacgaccagcccggcaccttttacggtaaatgcgcggtcaatcgcgaggcggaaactatgttggctggcgtgctcgcgttccggcaactgaagcagatgctcgcgcagggcatccattccccgaccttcggttgctgcggtgataaacagttttgcctcagcaaaaccgtattcccgcagaacctcctttacctggcgttcaacctcatcaacacgcgcttcgtccacgcgatcggctttggtcagcgccactgtcagcatcgggttaccggtcagctgcaaaatcgccagatgctcacgggtctgtgccatcacgccgtcatcgcacgccaccaccaacagcgcgtgatcgataccaccaacgcccgccagcatgttggaaagaaacttttcatgaccgggaacgtcgataaaaccaggcacgcgaccatccggctgcggccagtaggcatagccgagatcgatggtcatgccgcgctttttttcttccggcagacggtcagcatttacgccagtaatcgcctgcaataaggttgtttgccgtggtcaacgtgtccggcagtcgcaataatcatttcaacaacatctccaaaaaccgttgctcatcttcaaggcagcgtaaatccagccacaatcgtccgtcataaatacgaccaatcaccggcactggcaattcacgccagcgggcggctaatgactcaaggtggctaccgcgtccatcatggggtgtaaacgttaatgccgcgctcggcaggcgatcaaccggcagcgaaccactgccaatctgcgaaagacatggcataacctgtaccgcaaactccgcgccgtaatgtgcggcaaggggggcctgtaaacgttgtgcctggatttgaatgacctctgcgctgcgggtaagcaggcgcagggtcggtaatttttcactcagagcttcagggtgtaaataaagacgcaacgtggcttccagcgccgcgagggtcattttatccgcgcgtaatgcacgcttcagcgggtggctttgcaggcgggcgatcatctcttttttaccaacaataattcctgcctgcggcccgcctaacaacttgtcgccggagaaactcaccagactgacgcccgccgcaatcaactcctgcggcattggctctttcggcaaaccgtactggctaagatcgaccagcgagccactgcctaaatcagtcactacgggaacatccagctctttgccgagcgccaccagttccgcttcatctatcgctttggtgaacccctgaatgctgtagttactggtatgtactttcatcaacagtgcggtattttcattcaccgcctgacgataatcattcgcgtgcgtgcggttggtggtccctacttcgtgtagggtgcagcctgcctgacgcataacatcgggaatacgaaacgcgccgccaatctccaccagttcgccgcgagataccaccacctcttttccgctggcagtggccgccaacatcaataacaccgccgccgcattgttattgacgatacaggcatcttccgcccccgtaatacggcacagcagctgcgccagcgcccgatcgcgatgtccgcgtccggcgtcgtccagatcatactcgagggtcactggcgaacgcatagcctgcgcaacggcttccaccgcggcttccgcctgtaaagctcgcccaaggttggtatgcagcacggttcccgtcaggttgatcaccggacgcagcgcgctctgcgcttctttcgtcaaccgggcatcgacttcttgcgcccagttttcacaccacgcaggcagcgtctggctgccacgaatcacttctcgcgcttcgtcgagcatctgacgcaacaattccaccacgcgggtgtgaccataagtatcacgcaaagaaaggaaggagctatcgcgcaataagcgatcaatagccggaagttgactatagagggaacgcgtttcggttgtcataggaaacctggctgatcaaggccctctcacacggagaagggcgtttaacataaccacggattgtaacgtgagatgggtcaggaggacatatcgcgcatcaagcctttggcggttcggtgcgagcaaaactttcgcggctaaacaggttttcgaccagtttgactaagtgtgggcggtcgacacaccaacctggcgcaacgcggcggaaattgagatatccgacggcacaggcaatggcgatagtcgccagattgaccgtatcggttttgagtgtgccatcgaccagatatccttccagcacatccagactgcggttgattttctcccgctggcgtaacaattcatcttcagactgctgcgccgctggacgcgcctgttcacgcaccgataccagcccggcatccataatgccatccgccagtgcctcaattttgcgcacccgcaacgactccagcggatcgcgcggcaacatcgccggagcgacattcattaattcaatatattcagcgatgatcggcgaatcaaaccagcattcgccctcttcggtcaccagcaccggcacttttcctaacgggttaaattgcgccacgccgttgtccgcgttatagggcagttcattaataaattcgaaagttatgcccttttctaacaacagaatagaaagtttgcgtacaaacgggctggtgtagctaccgacgagtttcatgccgagtcctttgtgcgaggaaaaatatcagtatggcctggtgatgggaaaaagggcagaaaatgttgatggtttgttacttccaaataaatcacatatttatcatggtgatataaatattttcctaattatttcactctgatggatatctcacttcaggctttcttataaatctgtagggtttcgcctgtcagcagacaaataacccgataaaacaaggatgagaaatgagcggaaaaccggcagcgcgtcagggcgacatgacgcagtatggcggtagcattgttcagggttcagccggggtgcgcattggtgcccccaccggcgtggcctgttcggtgtgccccggcggagtgacgtccggccatccggtcaatcccctgctcggtgcaaaggtccttcccggtgaaaccgacatcgccctgcccggcccgctgccgttcatcctctcccgcacctacagcagttaccggacaaaaacgcccgcgccggtggggagcctcggccccggctggaaaaatgcctgcggatatccgcttacagctgcgcgataacacactgatactcagtgataacggcggcagaagcctgtattttgagcacctgtttcccggtgaggacggttacagccgcagcgagtcactgtggctggtgcgcggcggcgtggcgaaactggatgaaggtcaccggctggccgcactctggcaggcgctgccggaagaactccgcttaagtccgcatcgttatctggcgacaaacagtccgcaggggccgtggtggctgctcggttggtgtgagcgggtgccggaagcggatgaggtgctgcctgcgccgctgccgccgtaccgggtactgaccgggctggtggaccgcttcgggcgcacacagacgttccaccgcgaagccgccggtgaattcagcggcgaaatcaccggcgtgacggatggtgcctggcgtcacttccggctggtactgaccacgcaggcgcagcgggcagaagaagcccggcagcaggccatttccggcgggacggaaccgtccgcttttcctgataccctgccgggttacaccgaatatggccgggacaacggcatccgtctgtctgccgtgtggctgacgcacgacccggaatacccggagaatttacctgccgcgccgctggtgcgctatggctggacgccccgcggcgaactggcggtggtgtatgaccgtagtggcaaacaggtgcgcagctttacttacgatgataaataccggggccggatggtggcgcaccgtcacacgggccggccggaaatccgttaccgttacgacagcgacgggcgggtgacagaacagctaaacccggcaggcttaagctacacgtatcagtatgagaaagaccgcatcaccatcaccgacagcctggaccgccgtgaagtgctgcacacgcagggcgaagccgggctgaagcgggtggtgaaaaaggaacacgcggacggcagcgtcacgcagagtcagtttgacgccgtgggcaggctcagggcacagacggatgccgcaggcaggacaacagagtacagcccggatgtggtgacgggcctcatcacgcgcataaccacgccggatggcagggcatcggcgttttactataaccaccacaaccagttaacgtcagccaccgggcctgacgggctggaattgcgccgggaatatgatgaattgggccgtctgattcaggaaactgcccctgacggcgatatcacccgctaccgttatgataatccacacagtgacttaccctgcgcaacggaagatgccaccggcagccggaaaaccatgacgtggagccgttacggtcagttgctgagcttcaccgactgttccggttatgtaacccgttatgaccatgaccgcttcgggcagatgacggcggtgcaccgcgaggaagggctgagtcagtaccgcgcatacgacagccgtggacagttaattgccgtgaaagacacgcagggccatgaaacgcggtatgaatacaacatcgccggtgacctgaccgccgtcattgccccggacggcagcagaaacgggacacagtacgatgcgtggggaaaggccgtccgtaccacgcagggcgggctaacgcgcagtatggaatacgatgctgccggacgggtcatccgcctgaccagtgaaaacggcagccacaccaccttccgttacgatgtacttgaccggctgatacaggaaaccggctttgacggccgcacacagcgttatcaccacgacctgaccggcaaacttatccgcagcgaggatgagggtctggtcacccactggcactatgacgaagcagaccgcctcacgcaccgcaccgtgaagggtgaaaccgcagagcggtggcagtatgacgaacgtggctggctgacagacatcagccatatcagcgaagggcaccgggtggcggtgcattacaggtatgatgagaaaggccggctgaccggtgagcgtcagacggtgcatcacccgcagacggaagcactgctctggcagcatgagaccagacatgcgtacaacgcgcaggggctggcgaaccgctgtataccggacagcctgcccgccgtggaatggctgacctacggcagcggttacctggcaggcatgaaactcggcgacacaccgctggtggagtacacccgcgaccgcctgcaccgggaaacgctgcgcagcttcggccgttatgaactcaccaccgcttatacccctgccgggcagttacagagccagcacctgaacagcctgctgtctgaccgcgattacacctggaacgacaacggcgaactcatccgcatcagcagcccgcgccagacccggagttacagctacagcaccaccggcaggctgaccggcgttcacaccaccgcagcgaatctggatatccgcatcccgtatgccacagacccggcaggtaaccgcctgcccgacccggagctgcacccggacagcaccctcagcatgtggccggataaccgtatcgcccgtgacgcgcactatctttaccggtatgaccgtcacggcaggctgacagagaaaaccgacctcatcccggaaggggttatccgcacggatgatgagcggactcaccggtaccattacgacagtcagcaccggctggtgcactacacgcggacacaatatgaagagccgctggtcgaaagtcgctatctttacgacccgctgggccgcagggtggcaaaacgggtgtggcggcgtgaacgggacctgacgggctggatgtcgctgtcacggaaaccgcaagtgacctggtacggctgggacggcgaccggctgaccacaatacagaacgacagaacccgcatccagacgatttatcagccggggagcttcacgccactcatcagagttgaaaccgccaccggtgagctggcgaaaacgcagcgccgcagcctggcggatgcccttcagcagtccggcggcgaagacggtggcagtgtggtgttcccgccggtgctggtgcagatgctcgaccggctggaaagtgaaatcctggctgaccgggtgagtgaggaaagccgccgctggctggcatcgtgcggcctgaccgtggagcagatgcaaaaccagatggacccggtgtacacgccggcgcgaaaaatccacctgtaccactgcgaccatcgcggcctgccgctggcccttatcagcaaggaagggacaacagaatggtgcgcagaatacgatgaatggggcaacctgctgaatgaagagaacccgcatcagctgcagcagcttatccgcctgccggggcagcagtatgatgaggagtccggcctgtattacaaccgccaccgctattatgacccgctgcaggggcggtatatcactcaggatccgattgggctgaaggggggatggaatttttatcagtatccgttgaatccagttacgaatacagatcctctggggttagaagtttttcctagaccattccccttgccaattccatggcccaaaagccctgcacagcagcaagcagatgataatgctgcaaaagcattgacaaaatggtggaacgatacagcatcacaaagaatatttgactctctaatattgaataatccgggactagcattagatataacaatgatagcttctcgtggaaatgttgcagacacagggataactgatcgtgtcaatgacataataaatgacagattctggagtgatgggaaaaaacccgacagatgtgacgtacttcaggaactaattgattgtggtgatattagtgctaaagatgcaaaaagcacacagaaagcctggaattgtcgtcactccagacagtcaaacgataaaaaaagatagcccttgtggaggttcctgcaatgtcaaatacataccagaaaagaaaggcaagtaaagagtatggtttatataatcaatgtaagaaactaaatgatgatgaattatttcgcttacttgatgatcacaattccttgaaaaggatttcatctgccagagtattacagttaagaggtgggcaagacgctgttagattggcaattgagttctgctctgataaaaattatatccgtagagatatcggagcatttatactcgggcaaataaaaatttgcaaaaaatgcgaagataatgtttttaatattttgaacaatatggcattgaatgataagagcgcttgcgttcgagctacggcaatcgagtcaacggctcagcgatgcaagaaaaacccaatttattcacctaaaatagtagaacaatctcaaattactgcttttgataaatcgactaatgtcagacgtgctacagcatttgctatttctgttatcaatgataaagcaacaattccactattgattaatctgttaaaagatccaaatggagatgtcagaaactgggccgcatttgcaataaatatcaataaatatgataatagtgatattagggattgttttgtggagatgcttcaggataaaaatgaggaagtccgtattgaagcaataatcggactttcctacagaaaagataaaagggttttatctgttttatgcgatgagttaaaaaaaaatactgtttatgatgatatcattgaagctgcgggtgaattaggtgataaaacgctacttcctgttttagatactatgttgtacaagtttgatgacaatgaaattataacttccgctattgataagctgaagcgttcatagcgtgagttgcctatgcacagtgggggattcccgccggcacggtgcagatgctcgaccggctggaaagtgaaatcctggctgaccgggtgagtgaggaaagccgccgctggctggcatcgtgcggcctgaccgtggagcagatgaaaaaccagatggacccggtgtacacgccggcgcgaaaaatccacctgtaccactgcgaccatcgcggcctgccgctggcgctcatcagcacggaaggggcaacagcgtggtgcgcagaatatgatgaatggggcaacctgctgagtgatgagaacccgcatcatctgcagcagctcattcgcctgccgggtcagcagtatgatgaggagtccggcctgtattacaaccgccaccgctattatgacccgctgctggggcggtatatcactcaggatccgattggactgaaggggggatggaatttttatcagtatccgttgaatccggtcataaatgtagatccgcaaggtttggttgatataaatttataccccgaaagtgatcttatccattctgtagctgatgagattaatatcccaggcgttttcacaatcggggggcatggtacccccacatctattgaatccgcaacgcgcagtatcatgacagctaaagatctagcatatctaattaaatttgatgggaattataaagatgggatgacagtttggttattttcttgtaatacaggtaaaggacaaaattcatttgctagccaattagctaaagagttacatacaaatgtaataggacctgacacgctatggacgtggtgggggcgaggaactaatggtaagttaaaaatggatacagtgctaacagcaccaacgaaccttaattcaaataaggatctaatggctataacaacaaaagaccttggtaattggataacatatgggccatctgggcaccccatttctaatatgcaaggtacgccagaaaaacccagtgatataagataggttgtagatgtatgaaagcatgcttgttactatttttttatttctcttttatttgtcaattgcatggtgctgatgtgaaaataaaacaaaacgaaagtatgatggggtctacagcaatgacctatgatttaagtgaagaaaagttgatgaaactgaagtataaatcacaacatggtgattcagaggcatcatttcgactatatcaatattactgctttactaaaaataacatttacaaacaattgcgattcttggaaagatcagcatctcaggggaatgttacagcgcagtttaattatggggtctttttatcagatacaaatccaacattatcagaatattataatttgaatagagctatttattggatggaattcgctgtaaataacggtaatattgatgcaaagagcaaacttcaagagctcaaaaagctaaagcgaatggatagaaggaagaataaggagaatccgtaaaagcaatagttcatcagactgccgcagcagtagtatgatgatgaatcagggctgtactataactattatcggtaacattaaccgcagcaggggcggtataacactcaggctccgattgggctggaaggtaggtggaatttttatcagtatccgttgaacccgatttctggaatcgatccccttgggattagccacctgtttatacagcataactttaggtatgctttcgtgtgtttcagatataccatgtgatgataatttttatgatgtgcttagtattccagtcgcttctggtaataatatgcaatgtaaaaataatccccgttgtacacatttataaatagatggccaatacctcaaggcctatggagttggaatgttaatgacccgggagcaagcaatagaaaacctgacggcatacgattagtaccgtcagttaatacaggaacttataatcgcaatggattttcaatacatagttgtttaaacgcttttggtccgtctttaggacctcgattctgttccgagggttgtataactggtttatctaatgacatgcaaaaattaaatgagttaatattttcagagccagatagcacattaacagttacggactaaaaaatatggcaaggttattaacaattgtatttttttctctatttctgcgagtgcagttactgcaagacaatttcagagagagttagatttggcagacaaagcaatattatgggcactaatatcagccagtactaaagagggacgaaagcgtgttcactaagctattttgcctgtaaggccgcagaggctgaactcggactggcatatatggctgcgaatgataacaaggaatttctcacatccttatctaatataatgaggtacaaaatagatgctggactttccgaatcctatacatgctatttattaagtaagggaaagatcataagaccatatctgaaaaatctaaatccactccaacttgccgctgattgcattgaaacagtaaataaaataaaagataagaataaaaaaatcattgatataaattcagttaatatttgtagtgatgataaaaatataaaattgagagttaatagtactattatggccattgatgattctataaagtgcatcgatgaatgataacttaattttatttaaaaatatattaataactcactctccaggagtttttttaacttagttttataatgaatacgataattaaaagtgaagaagaaaatagttgtatacatatattccatgaccctacattgtgatctatagattaaatattttttaaatgtgactgtcatccttcagataataaagccatcatcgcaatagatggaaaagcactcctgctcttttttgattagagccgtcgcaggaggaacaactcatatcatcattgcgatctcgacgatgtatagtctcatcctgcggcagaacaagacggataaaaaatccaatgagagcacactcatccagaacttattaacataatgaatattaaagaaaaatcatcgcagctaatgaagtaatatgcaaaaataattagtccttacaaggagcaaagttccataatctcccccctccccctcaatgatccaaataaagataatgcatccagctggtcattcttagcagcactttccgcatcaccgaaacatggctgaaatggtcggagtaaaccgccacctgggcgtagatgccgtcgggtaaggcatcgatatcatcgttagggtccagttcaatggttcccagcacaccgtccgtgccgggcacgaccgttaatgattgcaataccccctgcgcctgataagaaccgcctggcacgacaggtaaaatactagtcagtttgccgtgaaacacctgcccaggtagcgcgttaaacaccacttccgcatcatcgccgggtttcagacgtaacagcgagttttgccgaaattgggcgacaatttgccgtttttgctcggggatgaagaccatcaccggacgcagcggcaaggcagctgcgtatgtacctgggcggatcagtacctgagtaacgtagccattgctcggcgcgcgaatgacagtctgctcaaggttatattttgcttcagtaagttgcgctcttaagctcacaatctgcgattgctcgccgttaaccatactgtcgagctggctctggatctgcgcctgctccgccaccgagcctttcaccagcgcatcctgcgcgaggaaattttgccgcgcatcgtcgatgtcacgttccgagaacggattcaccgccgcctggctgcctttcaagtaacgttgataatttttaaacagacggtcgcgctccgctgaaacctgggtagtgttggcctgcgcttcagtgagctgcgcacgcagcgtctttatattatgcgtcgccgtcatcaggtcagcctgaagtctgtcaactcgcgcctggtaacgaaccgggtcgagcttaaaaagcacctcgcccttttgaataagctgattattcttgtcagtgacttcagtaacaattcccgtcacctgtggcgtgatagggatcgctatcactgccttttgcgcggtaaaagtgtaagggtggttgtagttcatcaacaaaatcaaaccactcaccagaaacacgcctcccagcgccgccgtcgccagcgtccactgatttaccggaatgcggaagattttaaagaccgcccacgccagcgccacgtaagttaaaacaatcaatagatccataattagatctccgggaacgtggaatagtcagtctttttctcggcggcgagttgatgctccagccgggaaattcggtcagaaagtgcggcgatttccgggtcagtcgctttctcctgcgacgcaacatgtgactgcataccccagccacgctccggttgatagagcgtcgcccagatccacagaaacggccagataacatgcagagtaaacaggctcacccagcccgccgtatgaatagcgtcggcatggggatggttgcgctttttggcaatcagataagggatgtcatgtatcgcgatgattccataaaaaatcaccagaaagacgaagatcagcactcccaacgcgaaatagtttagaaacatatctgcctcggattcacgtttatcagtgttgtttttgggctggcagccagaagggagtcaggctgatattttgacaataatccgggttcgcgattctcgccataacaccaaagaataatttttagaggtgatgagttgcttagttacataacgattgtatgacgaaggcataacatgctgtagatcacatcaggtgaacgccgtaagaaaatatcttgtgattcagatcacaaagattcaacaaaccatcaaaacaaaaatgtgacgctactcacatttaaatgccatttttagcgaaaatcgccgccttgttgcttttttacacaagcgttttgtgatgaacgtcacgtcaattacctctctaccccctatatttatgtgattgatatcacacaaaaggccgtcgactggacagttaaccgattcagtgccagatttcgcagtatctacaaggtccggctacctctgccgccacattaacaaaaaacctcgggcttccagcctgcgcgacagcaaacataagaaggggtgtttttatgtcatccgatattaagatcaaagtgcaaagctttggtcgtttcctcagcaacatggtgatgccaaatatcggcgcgtttatcgcgtggggtatcatcaccgcgttatttattccaacagggtggttaccgaacgagacgctggcgaagctggtcgggccgatgatcacttatctcctgccgctgctgatcggttataccggtggtaagctggtaggcggcgaacgtggcggcgtagtcggtgccatcaccaccatgggcgttatcgtcggcgcagacatgccgatgttcctcggttctatgattgcaggtccgctgggcggctggtgcattaagcacttcgaccgctgggtagacggtaagatcaaatccggttttgagatgctggtgaataacttctccgcaggcatcatcgggatgatcctcgctattctggcattcctcggcattggcccgattgttgaagccctgtccaaaatgctggctgcgggcgttaacttcatggttgtccatgacatgctgccgctggcgtctatctttgttgaaccggcgaaaatcctgttcctcaacaacgccattaaccacggtatcttctcgccgctgggtattcagcagtcccatgaactgggtaaatcaatcttcttcctgattgaagctaacccaggtccaggtatgggcgtgctgctggcgtacatgttctttggtcgtggtagcgctaaacagtctgcgggcggtgcggcaatcatccacttcctggggggtatccacgaaatctacttcccgtatgtgctgatgaatccgcgtctgatcctcgcagtcatcctcggcggtatgactggcgtgttcacgctgactatcctgggcggtggtctggtttctccggcatctccgggttctatccttgctgtactggcgatgacaccaaaaggtgcttacttcgctaacatcgcgggtgtgtgtgcggcgatggctgtctccttcgttgtctctgctattttgctgaaaaccagcaaagtgaaagaagaagatgatattgaagcagcaactcgtcgtatgcaggacatgaaagctgagtctaaaggcgcatctccgctgtctgctggcgatgtgactaacgacctgagccacgtacgtaaaatcatcgttgcctgtgacgccggtatgggttccagtgcgatgggcgcaggcgttctgcgtaagaaaattcaggatgcaggtctgtcgcagatttctgttactaacagcgcgatcaacaacctgccgccagatgtggacctcgtcatcactcaccgtgacctgaccgaacgcgctatgcgccaggttccgcaggcacagcatatttcgctgaccaacttcctcgacagcggcctgtacaccagcctgaccgaacgtctggttgctgcccaacgccacacggcaaacgaagagaaagtaaaagacagcctgaaagacagctttgacgattccagtgctaacctgttcaagctaggcgcggagaacatcttcctcggtcgcaaagcggcaaccaaagaagaagcgattcgttttgctggcgagcagctggtgaaaggcggttacgttgagccggaatacgttcaggcgatgctggatcgtgaaaaactgaccccgacttatctgggtgagtctatcgcggtgccacacggtacggttgaagcgaaagatcgcgtactgaaaacgggcgtcgtgttctgccagtacccggaaggcgtgcgcttcggtgaagaagaagatgacattgcccgtctggtgattggtattgctgcccgtaacaacgagcacattcaggttatcaccagcctgaccaatgcactggatgatgagtccgtcatcgagcgtctggcacacaccaccagcgtggatgaagtgctggaactgctggcaggtcgtaagtaatccaatcccaccctctccacatggagaaggtggggttaattgcctgatgcgctacgcttatcaggcctacaggatgcatcacaatttgttgaatttgcacgttcttgtaggccggataaggcgcttacgccgcatccggcgctgcccctctcctcacggagagggtttgggtgagggaaaagcctcaccccagccctctcgggtaaaaacattgatgaaggttaatactatgaaagcattacattttggcgcaggtaatatcggtcgtggctttatcggtaaactgctggcagacgcgggtatccaactgacgtttgccgatgtcaatcaggtggtacttgatgccctgaatgcccgtcatagctatcaggtacatgtggttggtgaaaccgagcaggtagataccgtttccggcgtcaatgctgtcagcagcattggtgatgatgtcgttgatctgattgctcaggttgatttagtcactaccgccgttggcccggttgtgctggaacgtattgctccggcaatcgccaaagggctggtgaaacgtaaagaacaaggtaatgaatccccgctgaacatcatcgcctgtgaaaacatggtacgcggtaccacgcagctgaaaggccatgtgatgaacgccctgccggaagacgccaaagcgtgggtagaagaacacgttggctttgtcgattccgccgttgaccgcatcgtaccgccttcggcttcggcaactaacgatccgctggaagtgacggtagaaaccttcagcgaatggattgtcgataaaacgcagttcaaaggcgcactgccgaacatcccaggcatggagttaaccgacaacctgatggcatttgtcgaacgtaaactcttcaccctgaacacgggtcatgctataaccgcgtacctcggaaaactggccggtcatcagaccattcgtgacgcgattctcgacgagaaaatccgcgcggtggtaaaaggtgcgatggaagaaagtggtgcagtattgatcaagcgctacggctttgacgctgacaagcatgcggcgtacatccagaaaattctcggccgttttgagaacccgtatctgaaagatgatgtagagcgcgtaggccgtcagccactgcgtaaactgagtgctggcgaccgtctgatcaagccactgctcggtacgctggaatatggtctgccacataaaaacctgattgaaggtattgccgctgcaatgcacttccgcagtgaagatgatccgcaggctcaggaactggcagcactgatcgctgacaaaggtccgcaggcggcgctggcacagatttccggtcttgatgccaacagcgaggttgtatccgaggcggtaaccgcttataaagcaatgcaataatggtggaccaggcgcaggacaccctgcgcccgaataacagattgtcagatatgcaggcaacaatggaacaaacccaggcctttgaaaaccgtgtgcttgagcgtctgaatgctggcaaaaccgtgcgaagctttctgatcaccgccgtcgagctcctgaccgaggcggtaaatcttctggtgcttcaggtattccgcaaagacgattacgcggtgaagtatgctgtagaaccgttactcgacggcgatggtccgctgggcgatctttctgtgcgtttaaaactcatttacgggttgggcgtcattaaccgccaggaatacgaagatgcggaactgctgatggcattgcgtgaagagctaaatcacgacggcaacgagtacgcctttaccgacgacgaaatccttggaccctttggtgaactgcactgcgtggcggcgttaccaccgccgccacagtttgaaccagcagactccagtttgtatgcaatgcaaattcagcgctatcaacaggctgtgcgatcaacaatggtcctttcactgactgagctgatttccaaaatcagcttaaaaaaagcctttcaaaagtaagcaacgtctgcttactgcccctctacctgcttcggccgataaagccgacgataatactccagacgttgtagatataacggcacgctttcatcgggtattccggacggaatcgcgttacggggaggaagttttttcagatactcccggaacgcctggcttgatgccatgaaatctacggctttatcgataagaagcggaacgttttcacctaatttgcccatgatgatatctccgtattaccccgcgccgggaatgcgcggccgccaattttagtttaggttcccggtaaagatgacattaaggaaaacgtgctgaatcctcaataatcatccgctgctgtttattatcttttttctatagatttcttaattaatcaacgaattgcgtagtttttgagcatgttaatgattacgttacagaactattacaatgtcattagttgtgaacaaagcacctggtcgcgcatactaggggctataaatttatctttatcagaagccatcacatgaaagaagtcgaaaaaaacgaaatcaaacgtctcagcgatcgcctggacgccatccgccaccagcaggccgatctttcgctggttgaagccgcagacaaatatgccgagctggaaaaagagaaagccacgctggaagcagaaattgctcgcctgcgtgaagttcatagccaaaaactgagtaaagaagcacagaagctgatgaagatgccattccagcgcgcaattaccaaaaaagagcaggctgatatgggcaagctgaagaaaagtgttcgcggactggtcgttgtgcacccaatgaccgcactgggccgcgaaatgggcctgcaggagatgactgggttttcaaagaccgcgttttaagaacacagtatctacagggtgattctgcacattcctataggccgagtaaggtgttcacgccgcatccggcaagataaggcgctctggatcaacaacctaagggcaattctctgatgaggattgcccttttctttaccagacatctccccccacaagaattggccctaccaattcttcgcttatctgacctctggttcacaatttcccaattaaaactcacatcaatgttgccaatacataacatttagttaaccattcattgtcattatccctacacaacacaattggcagtgccacttttacacaacgtgtgacaaggagatgagcaacagactcattacacgatgtgcgtggactccaggagacctgcaatgaatctctggcaacaaaactacgatcccgccgggaatatctggctttccagtctgatagcatcgcttcccatcctgtttttcttctttgcgctgattaagctcaaactgaaaggatacgtcgccgcctcgtggacggtggcaatcgcccttgccgtggctttgctgttctataaaatgccggtcgctaacgcgctggcctcggtggtttatggtttcttctacgggttgtggcccatcgcgtggatcattattgcagcggtgttcgtctataagatctcggtgaaaaccgggcagtttgacatcattcgctcgtctattctttcgataacccctgaccagcgtctgcaaatgctgatcgtcggtttctgtttcggcgcgttccttgaaggagccgcaggctttggcgcaccggtagcaattaccgccgcattgctggtcggcctgggttttaaaccgctgtacgccgccgggctgtgcctgattgttaacaccgcgccagtggcatttggtgcgatgggcattccaatcctggttgccggacaggtaacaggtatcgacagctttgagattggtcagatggtggggcggcagctaccgtttatgaccattatcgtgctgttctggatcatggcgattatggacggctggcgcggtatcaaagagacgtggcctgcggtcgtggttgcgggcggctcgtttgccatcgctcagtaccttagctctaacttcattgggccggagctgccggacattatctcttcgctggtatcactgctctgcctgacgctgttcctcaaacgctggcagccagtgcgtgtattccgttttggtgatttgggggcgtcacaggttgatatgacgctggcccacaccggttacactgcgggtcaggtgttacgtgcctggacaccgttcctgttcctgacagctaccgtaacactgtggagtatcccgccgtttaaagccctgttcgcatcgggtggcgcgctgtatgagtgggtgatcaatattccggtgccgtacctcgataaactggttgcccgtatgccgccagtggtcagcgaggctacagcctatgccgccgtgtttaagtttgactggttctctgccaccggcaccgccattctgtttgctgcactgctctcgattgtctggctgaagatgaaaccgtctgacgctatcagcaccttcggcagcacgctgaaagaactggctctgcccatctactccatcggtatggtgctggcattcgcctttatttcgaactattccggactgtcatcaacactggcgctggcactggcgcacaccggtcatgcattcaccttcttctcgccgttcctcggctggctgggggtattcctgaccgggtcggatacctcatctaacgccctgttcgccgcgctgcaagccaccgcagcacaacaaattggcgtctctgatctgttgctggttgccgccaataccaccggtggcgtcaccggtaagatgatctccccgcaatctatcgctatcgcctgtgcggcggtaggcctggtgggcaaagagtctgatttgttccgctttactgtcaaacacagcctgatcttcacctgtatagtgggcgtgatcaccacgcttcaggcttatgtcttaacgtggatgattccttaatgattgttttacccagacgcctgtcagacgaggttgccgatcgtgtgcgggcgctgattgatgaaaaaaacctggaagcgggcatgaagttgcccgctgagcgccaactggcgatgcaactcggcgtatcacgtaattcactgcgcgaggcgctggcaaaactggtgagtgaaggcgtgctgctcagtcgacgcggcggcgggacgtttattcgctggcgtcatgacacatggtcggagcaaaacatcgtccagccgctaaaaacactgatggccgatgatccggattacagtttcgatattctggaagcccgctacgccattgaagccagcaccgcatggcatgcggcaatgcgcgccacacctggcgacaaagaaaagattcagctttgctttgaagcaacgctaagtgaagacccggatatcgcctcacaagcggacgttcgttttcatctggcgattgccgaagcctcacataacatcgtgctgctgcaaaccatgcgcggtttcttcgatgtcctgcaatcctcagtgaagcatagccgtcagcggatgtatctggtgccaccggttttttcacaactgaccgaacaacatcaggctgtcattgacgccatttttgccggtgatgctgacggggcgcgtaaagcaatgatggcgcaccttagttttgttcacaccaccatgaaacgattcgatgaagatcaggctcgccacgcacggattacccgcctgcccggtgagcataatgagcattcgagggagaaaaacgcatgattatttccgcagccagcgattatcgcgccgcagcgcaacgcattctgccgccgttcctgttccactatatggatggtggtgcatattctgaatacacgctgcgccgcaacgtggaagatttgtcagaagtggcgctgcgccagcgtattctgaaaaacatgtccgacttaagcctggaaacgacgctgtttaatgagaaattgtcgatgccggtggcactggctccggtgggtttgtgtggcatgtatgcgcgtcgtggcgaagttcaggcagccaaagcggcggacgcgcatggtattccgtttactctctcgacggtttccgtttgcccgattgaagaagtcgcgccagccatcaagcgcccaatgtggttccagctttatgtactgcgcgatcgcggctttatgcgtaacgcgctggagcgagcaaaagcagcgggttgttcgacgctggttttcaccgtggatatgccgacaccgggcgcacgctaccgtgatgcgcattcaggtatgagcggcccgaacgcggcaatgcgccgctacttgcaagcggtgacacatccgcaatgggcgtgggatgtgggcctgaacggtcgtccacatgatttaggtaatatctcagcttatctcggcaaaccgaccggactggaagattacatcggctggctggggaataacttcgatccgtccatctcatggaaagaccttgaatggatccgcgatttctgggatggcccgatggtgatcaaagggatcctcgatccggaagatgcgcgcgatgcagtacgttttggtgctgatggaattgtggtttctaaccacggtggccgccagctggacggtgtactctcttccgcccgtgcactgcctgctattgcagatgcggtgaaaggtgatatagccattctggcggatagcggaattcgtaacgggcttgatgtcgtgcgtatgattgcgctcggtgccgacaccgtactgctgggtcgtgctttcttgtatgcgctggcaacagcgggccaggcgggtgtagctaacctgctaaatctgatcgaaaaagagatgaaagtggcgatgacgctgactggcgcgaaatcgatcagcgaaattacgcaagattcgctggtgcaggggctgggtaaagagttgcctgcggcactggctcccatggcgaaagggaatgcggcatagtcgtttgcgccccctcaccctaaccctctccctcagggagaggggaccgttcggcgctgtatgtactccctcactctgaaacgacaccgcactctttttttctccctcgcccctccggggagagggccggggtgaggggaaaaggccgcactgctcaccaattttctgctatcctgcccccgcactaagggggcagtatgctaaacatcgtactttacgaaccagaaattccgccaaatactggcaacatcatccgtctttgcgctaataccggctttcgtctgcatatcatcgaaccgatgggatttgcctgggacgataagcgcctgcgccgcgcggggctggactatcacgagtttaccgccgttacgcgtcatcatgactatcgcgcgttcctcgaagcagaaaatccccagcgcctgttcgccctcaccacgaaaggtacacctgctcacagcgccgtaagctatcaggatggcgattatctgatgttcggcccggaaacacgcggcctgccagcgagcattcttgatgccctgcccgctgaacaaaaaattcgcattccgatggtgccggacagccgcagcatgaatctgtccaatgcggtgtcggtagtggtgtatgaagcctggcggcagttggggtatccgggagcggtattgagagattagttactgtaggccggatagatgattacatcgcatccggcacgatcacaggacattagatcccatccccatactcaaatgtatggttaataccgttgaaatgctggtccatatccattgatggcttatcgctgtctggtttaccgacaatacgagccggaacgccagcggcggtggtatgcggcggcaccggttgcagcaccacggaacctgcgccaatcttcgcgccgcgcccaacttcaatattgccgaggattttcgcgcccgcgccaatcatcacaccttcacgaattttcgggtgacggtcaccaccagatttacccgtaccgccaagcgtcacagattgcagaatcgatacgtcgttttcaatcaccgccgtttcaccaacgacgatgcctgtcgcgtggtcaagcatgataccgcgaccaatttttgctgccgggtgaatatcgacctggaacgtcacagaaacctggttttgcagaaagattgccagtgcgcgacgcccctgattccacaaccagtgaccgatgcgataggcctgcaaggcatgaaaacccttcaggtataacaacggggttgagtatttatcgactgccgggtcgcgggtacgcaccgcctgaatatcacaggccgcagaggcgatcatttccgggtcagcggcgtaggcttcttccaccacttcacggatagcaatagcaggcataattggcgatgacagcttgttcgccagcatgtagctcagtgcactgccaaggttttcgtgtttgagtagcgtcgcgtggtaaaaactggccagcattggctcacagtccgccagcgttctggcttcggctttaatattgttccagacaatttccagttcttcacacgacattgcttactccacacgatgagataatgaccggcccgttctgcgcgggccgggtcatagcggtaacaaaggttccctgaggttagtggctgctgcgctcgtccttgcgtgcacgacctaataacgtcaatgctgcctcgcgcgcgttttttccgcaatataatacttgataaatttcctcggttattggcatttcaacgccgaagcgatgcgccagttcgcggacttctttcgtattgcggtagccttccaccacctgaccaatcttctcctgcgcgctttgtacatccatgccctgaccgagcatcatgccaaaacggcggttacgcgactggttgtcggtacaggtaagcaccagatcccccagccccgccatgcccataaaggtggcaggatcggcacccagcgccgcgccaagacgcgacatttcagccagcccacgggtgatcagcgccgtacgcgcattcgcaccaaaaccgataccgtcggacatccccgcaccaatggcaatgacgtttttcaccgcgccgccaagctgcacgccaatgaaatccgggttactgtaaacgcggaaacttttgccgcagtgcagcagctgctgaagatcatcagcaaaggtctgatcggtcgaggccagcgaaatagctgtcggtaaacctgccgccagttctttcgcaaacgttgggccagagataaccgccagcggaatttgatcgcctaacgcctcgcgggccacgtcctgtaacagacgcccggtttccgcttccagccctttggtcgcccacaccagacgcgcatcaggacgcatcagcggtttaatctggcgcagcacttcaccaaagacatggctgggtacgacgacgagaatattacggctggctgccagcgcagtggcgagatcgctttcaagatggagcgtatcgggaaaaggcacatcggggagaaacgcggcgttacagcggtcgcgttcaagcgttgcgatatgttcagggtcatggccccagaggacaacctcgtggccatttcttgccagggtaatggcaagagcggtgccgtacgagccggcaccgatcacagtcattgaagcattacgttggttcatcaggcatcctgatgttcttcagtaccttcgccagcctgctgctgcaaatagttcatgaacagcgcatcgaagttaaccggcgcaaggttcagttgcgggaatgtaccgcgggataccatgctggtgatgcactcacgagcatacgggaacagaatgttcgggcagtatgcgcccaggcaatgtgccatctgggtgccttcgatacccgcgatggagaaaataccgccctgctgaacttcacacaggaacgcggtttcttcgcccagggaggccgttacggtaacacgcagtaccacttcgtatacgtcatctgccagttgggaagatgccgtatccagatcaagtttaacttctggttgccaatctttctggaaaacgtgcggcgcgttcggcgcttcgaaagagatatccttggtataaatacgttggatctggaaagtcatttcagtgttgttttgttctgacatgtgtagaaaacccttaagtgttgtccttaaatactgcgcaatgtaatgccaacgttcacacgttatttcagcaggggatccagtccaccacgtgcatccaatgcatacaagtcatcacagccgccaatgtgctgtgcgtcaataaaaatctggggaaccgtggtgcgaccgctgcgtttgatcatctcttcacgcttggcggcattgccatcgatcggcaactcctgaaaactcacgcccttgctgctcagcagtgcttttgcacgatggcaatacgggcaggtttctttggtatagatttcaacattggccataatttagctcctgtttttttaccctgaaatttcatgttgcagggcggctgcaaaatggagtgtccccagaagcttataacaataagtcgctgggggcctaattgcagctaacggcctgcatcatgaaagacgacaggtaaattatttgccgcgcaccagaggcaagttttcgccagcccagccagcaacgccctctttcagcacgaatacttgcgcaaaaccagctttcgtcagcgcgtttgcaggctcctggcactgcatgccagaaccgtctaccacgataaccggtttgtctttgtgcttctcaagctcaccaacattgttggctttgatttcgctcggcaacagattgatagaacctgcgatatggcctttacggaagtcatcacgctgacgtaaatccacaaccacagcgtcttctttgttgatcagacgcgtagcttcaccacgagtaatcaccttcactttcgaggtcaggctcttaaacgtagtcacaagaaccgccaccagtaacgcgatccaggcgatactcagtatgggatgacggccaacaaattgcataatttcttgcatggggggtaacaactcccgacgtagtgattaaaaaaaccaggaaaggagtatacctgcgcggtgcggcaaatacagccagcgcgttaactggaatgcaattttgcggggcacgacgaaaaaaaagcgcaaatctggcatcggcttgccgcgagcggtcgtatattttgatcttcagaggctattttatcgattcagctgtagtaaaattacgcaaattttgactcttgagtatgaggttgtcgcaatgtcggtttctaaaaaacctatggtactggtgattctggatggctatggctatcgtgaagaacagcaggataacgccatttttagtgctaaaaccccggtaatggatgcactgtgggccaatcgtccgcataccctgatcgacgcttccggtctggaagtcggtctgcctgaccgtcagatgggtaactccgaagtaggccacgttaacctgggtgccggccgcatcgtgtatcaggacctgactcgtctggacgttgaaatcaaagatcgcgctttctttgctaatccagtgctgactggcgcggtagataaagcgaaaaacgcaggtaaagcagtacacattatgggtctgctctccgcaggcggcgtacacagccacgaagatcacatcatggcgatggtagaactggcagctgaacgcggcgcagaaaaaatctacctgcacgcattccttgacggtcgcgacaccccgccgcgcagtgctgaatcctcgctgaaaaaatttgaagagaaatttgctgcgctgggtaaaggccgcgtagcgtccatcattggtcgttactacgcgatggaccgcgataaccgttgggatcgcgttgaaaaagcctatgacctgctgactctggcgcagggtgagttccaggccgatactgccgttgctggtttgcaggcagcttatgctcgcgacgaaaacgacgagttcgtgaaagcgaccgttattcgtgcagaaggtcagccagatgcggcaatggaagacggcgatgcgctgattttcatgaacttccgtgctgaccgcgcgcgcgaaatcactcgtgcattcgtaaacgcagatttcgacggcttcgcgcgtaagaaagtggttaacgtcgatttcgtgatgctgaccgaatacgccgctgacatcaaaactgcggttgcttacccacccgcttccctggttaacaccttcggcgagtggatggcgaaaaacgacaaaactcagttgcgtatttccgaaaccgaaaaatatgcccacgttactttcttcttcaacggtggcgtagaagagtcgttcaaaggcgaagatcgcattctgatcaactcaccgaaagtggctacctacgatctgcaaccggaaatgagctccgcagagctgaccgaaaaactggttgcggccatcaagagcggcaaatacgacaccattatctgtaactatccgaacggcgacatggtaggtcacaccggggtgatggaagcggcggttaaagcggttgaagcactggatcactgcgtggaagaagtcgcgaaagcggttgagtccgtgggtggacaactgctgatcaccgctgaccacggtaacgctgaacagatgcgcgatccggcaacgggtcaggcacacacggcacacaccaacctgccagttccgctgatttacgttggtgataagaacgtgaaagcggttgcaggcggcaaactttctgacatcgcgccgaccatgttgtcgctgatgggtatggaaatcccgcaagagatgactggtaagccgctgttcatcgtggaataatccctccccatgaggggaaaggcgattaataccatgacacgggccgtgaaaccgcgcaggtttgcaatcaggcccatcatctacgccagcgttcttagcgctggcgtattgttgtgcgccttttccgcccacgcggatgagcgtgaccaactcaaatctattcaggccgatatcgccgcgaaagagcgcgcggtacgccaaaagcaacaacaacgcgcaagcctgctcgcacaattgaaaaagcaggaagaagcgatctctgaagccacccgtaagctgcgcgaaacgcaaaacacgctcaatcaactcaataaacagattgatgagatgaacgcgtcgattgccaaactggagcagcaaaaagccgcccaggagcgcagcctcgccgcacaactggatgccgcattccgtcagggcgagcataccggtattcagctaattctcagcggtgaagaaagccagcgtggacagcgtttacaggcttatttcggctatctcaaccaggcgcgacaagaaaccattgcccagttgaagcaaacgcgtgaagaagtcgccatgcagcgtgctgaactggaagagaaacaaagcgagcaacaaacgctgttatatgaacagcgcgcccaacaggcgaaactgactcaggctctgaacgagcgtaaaaagacgctggcggggctggaatcttccatccagcaaggtcagcagcagctaagtgaactgcgtgccaacgaatcccgtctgcgtaacagcattgcccgtgcggaagccgcggcgaaagcgcgtgctgaacgagaagcgcgtgaggcccaggcggttcgcgaccgccagaaagaagcgacgcgtaaaggcaccacctacaaaccgactgaaagcgaaaaatcgctgatgtcccgtaccggtggtctgggtgcgccgcgtggtcaggcattctggccggttcgcgggccgacgctgcatcgctatggtgaacagctacagggcgaactacgctggaaaggaatggttatcggtgcctctgaaggtactgaagttaaagcgattgccgacggtcgggtgattctggctgactggctgcaaggttacggtctggtggtggtggttgagcacggtaaaggcgacatgagtctttacggctataatcagagcgcactggtgagcgttggttcgcaggttcgcgcgggccagccaattgcactggtgggcagcagtggcggtcagggtcggccttcactctatttcgaaattcgccgccagggtcaggcggtcaatccacagccgtggttgggaagataagttttgtttccatttcgtcgtaacgttcttgcatttgccgctctgttggcgctctcctcccccgtacttgctggcaaacttgccatcgtcattgatgattttgggtatcgcccgcacaacgaaaaccaggtgctggcgatgccctccgctatctccgtcgctgtattacccgattcaccgcacgccagagagatggcgaccaaagcgcataacagcgggcacgaagtgttgattcatctcccgatggcaccactgagtaaacagccgctggagaaaaatacgctgcgcccggagatgagcagcgacgaaattgagcgcattattcgtagtgcggtcaataacgtgccctatgccgtggggatcaacaaccacatgggtagcaagatgacctctaacctgtttggtatgcagaaagtgatgcaggcactggagcgttacaatctttacttcctcgacagcgtaaccatcggtaatacccaggcgatgcgcgccgcgcaaggtactggcgtgaaggtgatcaaacggaaggtgttcctcgacgattcgcagaacgaagcggacatccgtgtgcaatttaatcgcgcaattgatctggcgcgtcgcaacggttcaaccattgccattgggcatcctcacccttcaacggtacgcgtgctacaacagatggtttataacctgccgccagacattacgctggtgaaagccagcagcttgctgaatgaaccgcaggttgatacttctacaccgccgaaaaacgctgtgcctgatgcaccgcgtaatccgttccgtggcgtgaagctgtgcaaaccgaagaaaccgatagaacctgtttatgctaatcgcttctttgaagtattaagcgaaagcatcagccagagcacgctgatcgtttacttccagcatcagtggcaaggctggggcaaacagcccgaagcggcgaagtttaacgctagcgcaaattaaaggcgctacgcgtaatgcgatggtgcgaccgcgttttgtcgcgccattgccataagcggaaagaccacagtaacgcctggtaaccgaccttcacgctgcgcacattggtaatcaggcgcttatacataccggaagtaaatatctcggcaatcatccgttggcgggtaagaatatccggctctttgcgcaccgcatggcaaacacgcaatgcctcgtaagttatttgctgatgaaattccggataaatcataattttgtcggcataatttcgatttaatttctccagcaggcgggtaatcttaatatagtgacgttgataattaaggtttttattcccttgtctatgcaaccgactcactgacgtattatgcagataatatttatataatgattgctcggtatatcgcgcacgcagcgcgttaaacatgaattctgttgtccagacaatatcctgatgatgtaatccggcaataaatttaatgttatttttaacaataacatcacggcgataaacccccatccagacaacgtgagtccaacggcgcgaagaaagccccatccgcagccagtccgggccggttaagacgccggttgagcgaaggcgatcggtggggatggattgccaggtttctcccgtttcacgaaaacaccagtcagcgttgcactgcgccacgtcgaggtcgtcctctaacgccatggtcatcagcgtttcgtacatggtgggatagacttcatcgtcagcatcgacaaaagcgacatatttgcccgttgccacttcaatcccacgattacgcgccaccgatgcgccagcattcgcctgatgcaacaaacgaacgtgcggatagttttctgcgtaatgctttgctatttcaacagaattatccgttgaaccatcgttaataataatgatttccagagcagtccaggtttgcgtaattaaagattccatacaagtgcggaaatcatcgcccgcattatataacggaataataacactaagtttattggtgctgttcatcataaattaccgacgacctctgaagttatcctgacgttttacaggctttgtattaagaaactattaagcctgtgagatattatttttacaggtgagagagtcacttcagggtagagagataatgagagcagctatataagagatcagcacaattacgaactctttattacactgacaggattttacatatttaacagattatcctcagataaaagggctggaataccagcccttgttcgtgttaatcccagctcagaataactttcccggactggcccgaacgcatagcgtcaaagcccttctggaaatcatcgatagagaaacgatgggtaatgatcggcgagagatcgaggccagactgaatcagcgccgccatcttgtaccaggtttcaaacatctcacgaccgtaaatgcctttaatgaacaagcccttaaagatcacttttgtccagtctatcgacatgtcagaaggtggaatacccaacatcgcaatacgaccgccgtggttcatggtgtcgagcatggtacgaaacgctggcggcgcaccggacatttccagaccgacatcaaagccttcggtcatacccagttctgccatcacatcattaaggttttctttagcgacgttgaccgcacgggtgatacccattttgcgcgccagttcgagacgatattcattaacatccgtgatcaccacattgcgtgcaccaacgtgtttcgccaccgccgcagccataatacctatcggacctgcaccagagaccagcacatcctcgccaaccagatcgaacgacagcgcggtatgcacggcattaccgaagggatcaaaaatggaagccagatcgtcggagatattgtcgggaattttgaaggcgttgaacgccggaatcaccagatattcggcgaagcagcccgggcggttaacgccgacgccgatcgtgttgcggcacagatgggtacgaccgccacgacagttgcgacagtgaccgcaagtgatatggccttcgccagaaacgcgatcgccaatcttgaagcctttcacttcctgaccaatacctaccacttcaccgacatattcatggcccacgaccatcggcaccgggatggttttttgcgaccactcatcccagttatagatgtgaacgtcagtcccgcagatggctgttttacggattttaatcagcagatcgttatgacccagttccggctcaggaacgtcggtcatccagatgccttcttccgctttcagtttggataacgctttcatttcacatcctcaggcgataacgcccagttgtttaccaatacgcgtgaatgcttctactgcgcgcgtaatttgctcagaggtatgcgccgcagacatctgggtacgaatacgcgcctgacctttcggaacgaccggatagaagaaaccggtgacgtaaatcccctctttttgcagctcacgagcaaatttctgcgccactaccgcatcgccaagcatgaccggaataatggcgtgatcggctcccgccagggtaaagcccgccgccgacatttgctcacggaactgacgcgcgttcgcccacaaacggtcacgtagctcgctgcccgcttcaaccatctccagcactttgatggaagcggcgacaatcgctggtgccagcgagttggagaacaggtacggacgagaacgctggcgtagccactcaaccacttctttgcgcgccgcggtataaccaccagaagccccgcccagcgctttaccaagcgtaccggtgataatatcgacccggcccatcacatcgcagtattcatgggaaccacgaccgttttcaccgacaaaaccgaccgcgtgggagtcgtctaccatcaccagggcatcgtatttatctgccagattgcaaacgcccttcagattggcaatcacgccgtccatcgagaacacaccatcggtggcaatcagcacatgacgcgcaccggcttcacgcgcttctttcagacgagcttcaagctcctgcatatcgttgttggcatagcgatagcgtttagctttacacagacgcacaccatcaataatagacgcgtggttcagtgcgtcggagataatggcgtcttccgcacccagcagtgtttcaaacaggccaccgttagcatcaaagcaggaagagtagagaatcgcatcttccatccccaggaatgcagccagcttctgctcaagctctttgtggctgtcctgagtgccacaaataaaacgcaccgaagccatgccgaaaccatgagaatccattcccgcttttgctgccgcaatcagttccgggtggttcgccagccccaggtagttattggcacaaaagttaatgacgtggctaccatccgccacagtgatatccgcttgttgagcggatgtgataatgcgctcttctttaaacaatccttccgcacgagcggtttccagatcgttggctaactgctgataaaaatctccacgcatcgcgattctccagactgggcaaatttcagcacatattaccgaaagccataggttgatacgagatgaagcatttgtacttgtcaaaaaataagcataaatcacgctcaggcataccactttcggtgaatggctgtagccagcgccgtgtagtgatatgatagaagtattcgtgtctgagattgtctctgactccacaattcgaaggttacagttatgatcatcgttaccggcggcgcgggctttatcggcagcaacatcgttaaagccctgaatgacaaaggcatcaccgatattctggtggtggacaacctgaaagacggcaccaagtttgtgaacctggtggacctgaatatcgcagactatatggataaggaagacttcctgatccagattatggctggcgaagagttcggcgatgtcgaagcgattttccacgaaggcgcgtgctcttccaccaccgagtgggacggcaagtatatgatggataacaactatcaatactccaaggagctgctgcactactgcctggagcgtgaaatcccgttcctgtacgcttcatccgcagccacttacggcggtcgcacttccgactttattgaatcccgcgagtacgaaaaaccgttgaacgtctacggttactcgaaattcctgtttgatgaatatgttcgtcaaattctgccggaagcaaactcacagattgttggcttccgttatttcaacgtttatggaccgcgtgaaggccataaaggcagcatggcgagcgtcgctttccatctcaacacccagcttaataacggtgaatcaccgaagctgttcgaaggtagcgagaactttaaacgcgacttcgtctatgttggcgacgtggcagatgtaaacctgtggttcctggaaaatggcgtttccggcatcttcaacctcggtactggtcgtgcggaatccttccaggcggtagccgatgcaacgcttgcttatcacaagaaaggccagatcgaatacattccgttcccggataaactgaaaggccgctatcaggcattcacgcaggcagatctgacgaatctgcgcgcggcgggttatgacaaaccgttcaaaaccgttgccgaaggcgtaacggaatacatggcctggctgaatcgcgacatcaacgtaaattcacaaaatcattcgagcggtatcaaggcagcaactaagtgaatctccgggagcttacaaaagtaagtgaccggagtgaacgcaggcagccgccgcagagacagcttgaaggatgaagtgaatgaaaatattggtgatcggcccgtcatgggttggcgacatgatgatgtcgcaaagtctctatcgcacgctccaggcgcgctatccccaggcgataatcgacgtgatggcaccggcatggtgccgtccattattatcgcggatgccggaagttaacgaagccattcctatgccgcttggtcacggggcgctggaaattggcgaacgccgcaagctgggtcatagcctgcgcgaaaaacgttacgaccgcgcctacgttttacccaactccttcaaatccgcattagtgcctttcttcgcgggtattcctcatcgcaccggctggcgcggcgaaatgcgctacggtttactcaacgatgtgcgtgtgctggataaagaagcctggccgctgatggtggaacgctatgtggcgctggcctatgacaaaggtattatgcgtaccgcacaagatctgccgcagccattgttatggccgcagttgcaggtgagcgaaggtgaaaaatcatatacctgtaatcaattttcgctttcatcagaacgtccaatgattggtttttgcccgggtgcggagtttggtccggcaaaacgctggccacactaccactatgcggaactggcaaagcaactgattgatgaaggttatcaagtggttctgtttggctcggcgaaagatcatgaagcgggcaatgagattcttgccgctttaaataccgagcagcaggcatggtgccggaacctggcgggggaaacacagcttgatcaagcggttatcctgattgcagcctgtaaagccattgtcactaacgattctggcctgatgcacgttgcggcggcgctcaatcgtccgctggttgccctgtatggtccgagtagcccggacttcacaccgccgctatcccataaagcgcgcgtgatccgcctgattaccggctatcacaaagtacgcaaaggcgacgccgcagaaggttatcaccagagcttgatcgacattactccccagcgcgtgctggaagaactcaactctctattgttacaagaggaagcctgacggatgcgggttttgatcgttaaaacatcgtcgatgggcgatgttctccatacgttgcccgcactcactgatgcccagcaggcaatcccagggattaagtttgactgggtggtggaagaagggttcgcacagattccttcctggcacgccgccgttgagcgagttattcctgtggcaatacgtcgctggcgtaaagcctggttctcggcccccataaaagctgaacgcaaagcgtttcgtgaagcgctacaagcagagaactatgacgcagttatcgatgctcaggggctggtaaaaagcgcggcgctggtgacgcgtctggcgcatggcgtaaagcatggaatggactggcaaaccgctcgcgaacctttagccagcctgttttacaatcgtaaacatcatattgcaaaacagcagcacgccgtagaacgcatccgcgaactttttgccaaaagtctgggctatagcaaaccgcaaacccagggcgattatgctatcgcacagcattttctgacgaacctgcctacagatgctggcgaatatgccgtatttcttcatgcgacgacccgtgatgataaacactggccggaagaacactggcgagaattgattggtttactggcagattcagggattcgcattaaacttccgtggggtgcgccgcatgaggaaaaacgggcgaaacgactggcggaaggatttgcttatgttgaagtattgccgaagatgagtctggaaggtgttgcccgtgtgctggccggagcgaaattcgtggtatcggtagacactgggttaagtcatttaactgcagcactggatcgaccgaatatcacggtttatggaccaaccgatccgggattaattggcggatatgggaagaatcaggtggtttgtagggcaccagataaagatcttgctcatctgactgcagaaacggtatttaataaaatcaattcctgattaatacgttatatattatttaagatggtggagaagcaatgttaacagcctcgctggcgctacgtaataaagaaaagtggaaaccgtactggaataaagcgttggtattcctctttattgcaacctttttccttgatggtataacccgttataaacacatcatatctatactaatgattattacggtaatctatcaagtttctcgtgctccgggaacatttaaagtactctataaaaataatcttttttatagtgtcctggcactatcactcattcttttatatgctacttttatatcacctgatctgaaaatcagttttaaagaattcagtaatacggtacttaaaggatttttggcctatagtttacttatacctgcattattaaaagatgaagataatgaaagcattggtaaaattgtactatactcattagttaccggacttggcttacgttgtcttgttgaacttattctttatattcaggattataataaaggaataatgccattttccacctatgaacaccgtagtatttccgattcaatggtgtttctgtttccagcattattaaacctttggcttatcaagaaaacctcttataaaatagcattcgtaatttttagtgcagttttcttatttctgctattaggaacgctgtctcgtggtgcatggctggcagtattcatagtgactctgctatggttaatcttaaatcgtcagtggaaattattgatgctgacttccatcgttatttctgttgccgcagtgggtgtatttacctataaaggtgatcatgctggtaaagacaggcttatttataaacttcaacagaccgacagttcttatcgctataccaatggtactcaaggtacggcgtggacattaattatggaaaatcctcttaagggatatggctacggcgatgatatttaccatgcaatatataataagcgtgttgtagattttccgtcatggaagttcaggcaatccattgggccacacaacgttgttttgtcaatttggtttgcagcgggtttggctggactactcgctttactttatctgtatggctctattatcaaagagacagctaatgcaacgtttaaaacagttgtcgtcactccttataatggtcaattactactatttttaacgcttgtaagcttttatattattcgaggtaacttcgaggaagttgatctcaaaccaattggcttgattgttggtttactgttagcaatgcggaataaataaaaaaaagcctgcctgacattaagttcaggcaggctcttcaaatccaataatttttaaccaaaccagtcttgtatttgtgcttcaaaacgctgagtaacatgttcccagctatattttgagaaaacaaaatttcgggcatttttagcaatttgagctctgtcagcatccgccaaaacgcgcttaatatccgcgagaatactttcagatgtcataggctctgcaaggtgatagcctgtaattccttccagaacaaactcactaattccacctttttgactggcaagcactggtttacctgccgccatcgcttcaacagctaccatacaaaaagcttcttctacctgagaaggaacaacaactaaatctgctaaacggtaatagttatgcatctgctctggaggctgtccacccgccataatgcattgcgctccaatagctttcgctgcatccagaacttttttctgatattcagctttttcgccttttttactggcaaaaggatctccgacaatcaccagtttgaggttatcttgtatcttattcagctgattaaaagcctccataagcatcaggcaacctttatctggtgatatccttcctgcaaataataacacggtatcatttgcatcaatgttcagtttctgcctcaaatcttcagtattattttgttcatacgattcagaacaaaaaccattaggcacaatagcaatatttgcatcaggcattttttccgaatagaaatcgaaaagaaactggctaggaacaattatctttgcatttttgtctaactcacctggctcgaaagcattatgaagatgcataactagctgcgcgtgagggcttctgctacgaatctgtttatacagcttcatgctattgtggataacaataacagagtctttcggatcagtgtttttaggttgggtatttaaaatacgctgagaatatggcacaggatcaagtcgagtccacttttggaaaagtcgtttatagactcgactaaaaccaatgtagtgaatatcacagtgatcatttacttttgtgtaggttgggtaaccttcgtttcgaatacaggcgatagttactggaatcgaaagtctttttgcgacctgataaatccatgtttcaaccgctgcagctccttttggcggtatagaaaatattggtgtgacggtaaatattatttttttaatcattattagccaactccaatataatttataacacgtaataaacacatataaaatattagcttattttttcataaacacacggctcttcaatttcggatattttcatatagggaataatatcatattgaattgcagtatcgtcggataaattataaatattgatatcttctatattttcacgcataaaacggaaaaatggtaaaattttgaataaatcccgagtcaactctgagggcataggattcttatcttcatcatagaaacgcgaacagctacccgttaaatcaaggcctgaacagataatacgagcatacttcagcgaataggctatttggattgcagcaaaagcaacggtatggcatgaacaataaccgaggttaatatccttgcaaaagccaaccagacgaccttttttagaaaaaggtacagagatcaggagctctttatgaattcggctcaaaatattaaacttgatcttcttgatcaatccacctttttctctgcggtaaaatgaacgtagtaccaggcagttttgaaggatgtaccgcttatcttcttcagaagcatgttcataaacgtcaacatttacgatggtataacgacttctctggctaaatttataaaaatcatcacgccgttgatgtaaaaagcgaacatcggtaagtacataaatatagggaataatattatgacttaatagatattgtgcagaaccattgacagcaataacatcccttgtctgcagcactgacaatggtgttttttgcgatgtggggccggaaagaaaaataataacatcatcagacgttttactttctatcaggttttcaacatcttttttgtcaatgtatctaatattcttcatgataaacctgtgaaataagaactccgcatagaaatgtcctgacgaagacgtttaaatgtaagacttttactttatcgtgctggcttccctttcaaacgccgcataagattacgtatttttttacgataaactaaaagataataaccgagatctttaacctcattcttaataccataatgtcgctctaaatcaatacgatctttcgctttacgttgtgcagatgcccgttttcctgaaagatcaataatgcgtacttcaccattttcaataataaaattaccgcggtgaggatcaccagataccataccgtgttcgtgtaatgaacgaattgattgttgaattttattttttaaagtttcatcaatatcggggatatcacacaactctacgccatcgatatattcgataagcatgatataagtatggacaaaacgtaatgttttccgttctgccaacaaataaaaatcattgagagaatgtagcccctcgttacgcactttttgagtatgctcaaaaaggcgttcataataatctccctttaaaagagatttaaagaaacgttcgttgcgttttactttaggcgaaaaaactttaagtatcaatttaccgtaatcggtatcaataagcatgacttttgtatcatctatagaacgaaaaactttgatgatattaatatcataagaaagaaagtcatttaatacattgagatactttgagttattttcatcggtaaaaacaactaaatctttgattttattcttctgaatcatgttaaaccagttaaatgttatttacggtaatattttcggcaaagataacacactcctgcaatgagtcctgagatataatgatgttgcactaacagatgtttatatctttttttgaattcaataattgattttgcatctcgtggtgagtcatctttccaaggggatctttctaaagctattttatagtattttaccgatggataaattgcccatttgtgccacggcttggtggccccagtataatgaataagaagagtatcctcttttatcaactctttatatttttgatgcgttttatcttttaactcactttttattgtatatatagtattgaactcacgtggcaggaatattgtcatcccttttagtaggacattcataacgtcctggtcaggatacttataaatactatctttactcataagaatagacagtgctttttcggttagttttgcttctgtccatttttttaggtctaagtaaacgacaccagaattaaaatactgcccccgaagttcaggatcagataatctgactaccgccttttcctgcattgggtctacatccctgactactgcagccaccgctccattaaactctaaatgcaatagttgactaatatttcccttacaaactacatcggcatcaagataaagcaaacgattaagtgttactcccaataattgaaaagcaaataaacggaagtacattgctcttgaccagacttgtgtacaaggcaggcactgaagattatcagtatttattctataaagtgtgattcttaattggtattgctcagcaagtttctcaactttttgaaagaaatcgtcgttataaacatcagcaataatataaaaatcaagattaacatgtcgattattaatgacaattgaagtaatggaaacacctacaccatcaagataattggaatcgacaccataggcaacatttaaactttcagcagtattttcatcaataagcctaaaatcccaggctttaactttatctatctctatggcaggaaatgagttcacaaggctatccttatatcattactttatatactcgttatacttcaagttgcatgtgctgcatcggcgagttactcggcatttcagggccaacgcaagcgttcctcaaaacgccactggctttttgtcctgcaactcgaattatttagagtatagattatcagtattaatgctttagcttttttataaaatacaaaagatagttgccaaatcctttgatatattgcttttttttcaacatatgtttagcactgtatcttaattgattactattaaccggtttcaataacgcagtatccttccatggtgaagcattttttgccgccataaaagcttgtgatattggataatcccaggcccagtcatgccagggtttagttggaccaatataatgaataaaaactgtatcgttagttactgggtttttaaaactttcttttagttgataatttaaactaaactgagtgttatatttaatatcagcataaacaagtttgtctgccaataacatatttaatacatcctgatcaggatgtgttatttttttgactatctctggatcacttaacattgcaatggcccgtgcagaaacccgctcattcgtccattgattagtattaatcagtaaaaaaccggagttaaagtaaccattagcaatcccagcaacacctaacgaatgagcacgttttgcccaccagtctttttgtccttctgtaacaaccattgcgactgtatgttcagaaaacgtgtaattgataagtggttctatagttccctgacaaataatatctgcatccagataaagaactttgggtgctttattaaaaaagtaatcggcgataacaaaacgaaaataaatagcatgagtccagttcttggtgcagggtaatgaacggagtcgatcaccattaattaaatatatcttaattcttgttttatattgcctggccagggcatcaaaatatttgcgatcgtcatcaccgaaataatcagtaaaaatatgaaagcataattgatttccttcattatattttaatattgaagcaatcgatattccgcatccaaaaagaaaatttttgtcagtcccataagcaatatccagacaaagattttctgcttctattttatgattataatcaataaccgaattgagaaactcagtctcctggaaaaaaacctgctgcattatttcctccgggaaataacagaaataattatcttttgcaatctgtcgtaatatttcggttgataaaatttatcgatcgacgccggaattttttcatgtgcgatgtgaatttcaccggctatgtatttattgagaagagcaacaaaaccggtcatatcccccggttgatataaatgaccattaacatcaggctgaatgatatcaacaggcccggagacacaatctgcactgatacaagggatcccccacgacaaggcttcaagtagagtcattgggaaaccttcaaaagatgacgtgagtaataatgcactcacttttttaatatcttgctgaactaatttccagggatgttgttgccaaccataccagacaattcgatcatcaatatttaatcctctaccataagcctggcatttttcgaaatcggagccatctcccaatacatgaagtttccagtcaccttgcacttgtgataagccatcaagcagatcttttacgcgcttttggccttcaaatttcatgcgcccaacataaatgaatgttgccgtttcgccttccccgggtgcaggaatgactgaatttttcgcctcaacgggattaaaaataacgtttattgtcgattctggtacaccccggctaatcatttgctgtttaataccagagctgatggctaaatgatagtcggcacaggtgatatattcggcatgttttttatgatctaaagaaaaatgcggccatgaaaatacaggtacatcaatccccgattttttacgagctttggccgcatacaaacacgagatcacgtcaatacaaataacaacatctggctgataatcatgaagccatttgcttaaagcatgaatatgtttcgcgcgacgcaaaaaacctaagcgaatattggaaaatgaacacgagtacttaataccttccagccatcccttatccattttgtcattacgacaaaagaaaaaaatttcactttggatatgttgttgcctgaaggtagtaataacatcacgaatgactgtttccatgccgccaaatccagaaacagcttcgccaataaaggctattttcataatttcattccagctaaatctttaagccaaataatttaacaagtaaatacttataataataagaaatggctttacaatattttccttctagccaaaaaactttagactttaacctaatctcacttgatgatggagctagatttcttttatggttcttccaaggagaatttgaaaaataatgatcaaaattttgtgctctaaatattttgtaccatggtttattctgggtaacataatgcattataattgtgttgggcaagtttttttgttcttcatcacatcgtactgacaatgttgtcttattattgtacttcttatcaaggtaatgcactcgtccattaagtaaaatattgagcacatcctgatctgcatacctatatacttttccactgttgatcatttctaacgctttttgtgttatattattttttttccattcgctggtattaataaacataaccccggcattaaaataattaataaactcaatgccatagtctaatttttttacacgttcttgcatttctggcgaatctggaattacacatgcaatatcagcatttaaattataatcaaccagttcatctaaaggaccattacatatgacatcacagtcaagataaagtatcttatttattttatcatcaataacttctgggattaaaaaacgtaaacatgttgataaaggaataccaagaactaatgtatccggattaatgtcaaatttatcagttatataatatacagatattgatgtattaggaccttctagttcgtaaaaagctgaacactccttttcttctatgcctgatataagaaggtgaaaatgaaggttaatatgtctattgttggatataattgaatataatgcaacacccgctggcattatgaattcacggtcaaagcatagtgcaatatgtaaatttttaacatacgacacttcgttttggtataaatttttcttcttagcaacgaagtttctatatttcaacaattttagaatccctttttgtaataaaatactatttacaagttttttcttattgttcttgcttctatttttcctgctttaatccttgcctttttaagtaaatcaatctcaagtctataaatatcgcgtaaaggcatcccaaaataaaccttcataaatcgccagatatctctctgcgtcagaccaatattcattgatgagaaatataaaccaatcaaatctttatcccgccaacgacgtggtacttttgcacgtatctgtgcccggtgcagatcgataaccgaaatttttaattcatcttcccggccagtaaatggcaaatggagtaaaaagtggcagatataacaatcacggtgattaatccctgctgcatgcattttgcgcaccatggttgccacacgcgcgatcagcatacgcttaatatgtacatcaggcgggttgaccgcccaatctgcacaataatcttcaaggctaattgtgggagtgagatcttcggtaataataaatgatgtgcgagttaatggatttaaccctttttcaccaaatcctattccgtgcatcgtatcaacaccgacatcatgcagtcgatgaatagcgtgccactctctgtctgcacctaaaacgggcatccgcaatgagagcagattttttataatctcctttagggtcgtccctttgtgccatttgaggaaataacttttgccggccagttcaaagcgtaatgtgcgacgcgtctccagttcacggaagacctcgccattcagttttttaacttctgcaaaggcatctttaccacgccagagtgtggcaagtggctcttctaattcaaccatctaaaccacctgtaatgatatctgccgctttctccggcaggctgtataaatcctgagtatcggcgtaataccgagcattctccgcccaggccatgcgcaatggagattgagttaacgctttacgtaaaacgtcatttaattgttcctgggagaaaggttcagcgatgaccgttccacaattagcatctgtgatatagtgtgcgtatccgcataccgcagtcgtcaacacaggtaatcccgcggcaattgcctcaaggagaacaatacctgcagcctcctgataagcgggatgcattaataaatcagcggctgccattaattcagacacatcattccgcccggaaaagaaatgcactttactacgcacaccgagtttttctgccagcacttcaaatttacgcggtttatcctggccaacaacaaacaacaacgtattatggcgtaacgattctggtaacgatgccaaagcttcaattgagcgatccacacctttacgaccaaaatctgaaccaacctgcagcaataagttttgttgttcagtgatgccatttttctggcgataaatttcacgactgtttgggatttgcgcgttgtattttctgtcaggatagataccagggggaagaatttgaaaacgttctggttcagtttggtaatgcttctgaaaatcggcgatttgcttatcggtcaacatcataagtttcgtcgatttaccatgttcgaaagtcgctcgctcgaatgcagcataatggcgatagcgcgatgttaaacgatagaaaaatcccttttcttgcgccactttctcggcataacagacatcggcggcaaaataaacatccagcccaggcatcttattaaagccaacaacgcgatcagcgggatgtgccttcagatggttttgaacccaggcataatattctgcattacgtccatggttagtatgggatttaaccggtacgcgaataagctcaaatgcttccgggcaatcgccttcccacgactgtgtatatacccgaacatggtggccccgtgcggcaactgttgaggcaatacgcataaagtcacgctgtagcccaccaaatggaaaatatttatataagcaaaatgccacgatcataattgcgcattcctgtcagctgaaggtgcatcttctggcaacagcttttccgtagcggcaatgacatcttccgctggaataacagaaagatattttttgttgcggtcaagttcgtgccgggtaggcattttttgataattccccgcccagaactgaataatattctcggtccatggacgccagaatacatgatcagtggccccaaacaggctaataactggcgtcttcacagccgctgcaatatgccccggcgcagaatccacaccaataaagagcactgcatgatcaattaatgcgcccagttcaggaaaacgtgttttaccggcaaggccggtaataggttttgtttggcagcctcgtgcaatttcatctacgcaagcgagatcatctgccgaagggccacaagtcagcacaacctgataaccacgatgttgcaacgcatcgataaccatagaaaatttatcgttgtcccagcacttaaatatctgtctggctgtcggctggatgacgacataatgatctttcacgcccagtgcatctaattcctggcgcattttcttccagcaatcctcggcgtaactcatggttgtttcagtataaaaatcggtaatacctaatggctcaaggaccgacaaattacgctcaacaatatgtgtaccgtgtataggcgctaagtgtgtaaagctttttttccaaatgccatgctgccgatgaccataaagctgcgatattttcatacgagcaggtaaacaacgtaccagcagggccaccatccactgatccgtaagattaatgaccaggtcgtaattattcgcacgcagagtttttatcagtgaaagtgcatttttaattttatcgaatgttcccgtacctttattgcttataccatagagtgcattaatttctgggttttcagataaaatcggaattgtatcctggtaaagcagcatatcgatttttgcgtcgggataattctgcttgagtgtactgattacaggagtagttaataacatatctccgtgatatcgcatctttatgaccaggatttttcgaaatggcttttccactagcgactcttttgtgtgattgtctggttaagttaagcagaaaaaagcacgctaccgccccaggctcaacagctacccgaatactgataacgcacttactttgacgcgctagtgtatcatttctttcgcagcaatccgacccgaatgatttttatacacaaaatatgttttaattataaaaatcatagagataaaattttgcatactcgagaatccagatattgtcgatgtaaagctgcaatcctggctgaaattcaatgaatcgcataaaaatacaaaaaaaatgaagatctagcggcagatcagctcaaacagaggctaattaagtcaaaaaaaggaaaagtaatggcaaacccggtgctaaatacatagaatccccagcacatccataagtcagctatttattatgcttgaattgctttacaccgcccttctctaccttattcagccgctgatctggatacggctctgggtgcgcggacgtaaggctccggcctatcgaaaacgctggggtgaacgttacggtttttaccgccatccgctaaaaccaggcggcattatgctgcactccgtctccgtcggtgaaactctggcggcgatcccattggtgcgcgcgctgcgtcatcgttatcctgatttaccgattaccgttacaaccatgacaccaaccggttcggagcgcgtacaatcggctttcgggaaggatgttcagcacgtttatctgccatatgacctgcccgatgcacttaatcgtttcctgaataaagtcgaccctaaactggtgttgattatggaaaccgaactatggcctaacctgattgcggcgctacataaacgtaaaattccgctggtgatcgctaacgcgcgactctctgcccgctcggccgcaggttatgccaaactgggtaaattcgtccgtcgcttgctgcgtcgtattacgctgattgccgcccaaaatgaagaagatggtgcacgttttgtggcgctgggcgcaaaaaataatcaggtgaccgttaccggtagcctgaaattcgatatttctgtaacgccgcaactggctgctaaagcagtgacgctgcgccgccagtgggcaccacaccgcccggtatggattgccaccagcactcacgaaggtgaagagagcgtggtcattgccgcacatcaggcattattacagcaattcccgaatttattgctcatcctggtaccccgtcatccggaacgcttcccggatgcgattaaccttgtccgccaggctggactaagctatatcacacgctcttcaggggaagtcccctccaccagcacgcaggttgtggttggcgatacgatgggcgagttgatgttactgtacggcattgccgatctcgcttttgttggcggttcactggttgaacgtggtgggcataatccgctggaagctgccgcacacgctattccggtattgatggggccgcatacttttaactttaaagacatttgcgcgcggctggagcaggcaagcgggctgattaccgttaccgatgccactacgcttgtaaaagaggtttcctctttactcaccgacgccgattaccgtagtttctatggccgtcatgccgttgaagtactgtatcaaaaccagggcgcgctacagcgtctgcttcaactgctggaaccttacctgccaccgaaaacgcattgaggttgttatgcaaaaacgggcgatttatccgggtactttcgatcccattaccaatggtcatatcgatatcgtgacgcgcgccacgcaaatgttcgatcacgttattctggcgattgccgccagccccagtaaaaaaccgatgtttacccaggaagagcgtgtggagctggcacagcaggcaaccgcgcatctggggaacgtggaagtggtcgggtttagtgatttgatggcgaacttcgcccgcaatcaacacgctacggtgctgattcgtggcctgcgtgcggtggcagattttgaatatgaaatgcagctggcgcatatgaatcgccacttaatgccggaactggaaagtgtgtttctgatgccgtcgaaagagtggtcgtttatctcttcatcgttggtgaaagaggtggcgcgccatcagggcgatgtcacccatttcctgccggagaatgtccatcaggcgctgatggcgaagttagcgtagcgtttatgccggatggtatgccatccggcgcgcatgaattacttctggcactgccgacaataaaacgttgcccgctgcgcatgtttagtcgccacaatcggcgtaccgcacacccgacacggctcaccttttcgcccgtaaacctgcaattcctgcgcgaaatagcccggtttaccgtcgctttgcagaaaatcttttagcgttgtaccgccctgctcaatcgaacgcagcaacaccgctttaatcacccgagccagcaattcgcactccgccagcgacagtgatgacgccagccgatccggatggatccccgccgcaaacagagattcgctggcatagatattccctacgcctaccaccagcttgttatccatcagccacggtttgatcgccgtttttttcttcgcgcacttctgatgcagatactcaccattgaaatcgtcgctaagcggctccggtccaagatgggccagcacattatgcccttccagctctttggtccacagccaggcaccaaagcggcgcggatcggtgtagcgcagcactttgccgttgttcatcaccaaatccacatggtcatgcttttcagggggaagttcttctggaaggatgcgcaggctgccagacatccctaaatgaatgataatccagccctcaggcagctccagcagcagatatttagcccgccgctgcacgctaagcactggttggtcgcttaaacggtagatctcttctgaaaccggccagcgcaagcgtccgttgcgcaccactgcatgaagaatggttgcaccaacgagatgcggttctatgccgcggcggctggtttcaacttcgggtaattcaggcatagcatctccaggaatgaacagatgcagtcaatatgggggcaagcagataacaaaaaaccccgccggagcgaggttttttgttacatcaaagcgagaattatttgattttcgcttctttgtagatcacgtgctggcgaacaactggatcgaattttttcagttccagtttttccggcttagtacgtttgttcttcgtagtggtatagaagtgaccagtaccagcagaagaaaccagcttgattttctcacgaatacctttagccatgatttatttcctctaagtacttagtacttttcgccacgggcacgcagttcagccagaactgtatcgatgccttttttatcgattacacgcatacctttagcagatacgcgcagggtgacaaaacgcttctcgctctcaacccagaaacggtgagagtgcaggttcggcaggaaacggcgtttagtcgcgttcagtgcgtgggaacggttgttaccggtcaccggacgcttgccagtaacttggcagactcgggacatgtctattctccaaaaatcaaattagctcgagcttcgtatggggtattggcgcctcgtcaggctttacagcccggtcatcgcagttctatgtgaactctcgattgccaggcccaaatgccaaacccgagattctcaaaggtggcgtagtatacgctgactcagcgatgtgctcaagtcccgaacagacaaagatcccgaaggatcgcgcatagcgggttaaatccaaccgcgttcggcaaaagaaacatactctccacgcccaatcacgatatggtcgagcacgcgtaaatccatgaactgacaactctttattatccgttcagtaatgagtttatccgctttactgggttcagcacaacccgaagggtgattatgtgcaaggatcagcgccgaggcgtttatttttatcgcttcgcggataatttcccgaggatggacttcaacatggtttagcgtgccggaaaaaagacggctatgcgttataacccggtgttgtgagtcgagaaagatcaccataaagatctcccgctcctcacccgtgagctggctttgtaaaaattcccgcgtcatctccgggctgagtaaagggctttcttcacgcatccgcacgttgtagtaacgccgcgccagttcagcaatcccctttaactgggcaaatttcgccacgccaattccatgaacgccactaaattgttcatattcagaggttaacaagccataaagagagccgaaattctccagcatctcttttgccagggttaatacatctttaccgcgcgttccggtacgcagaaatagcgccagcagctcgacatccgttaaggcgctaataccaaacttcagcattttttcgcgcggcatcaacagctgtgaattgtttttcaccttcacctcctttgtggtgctcgcatcctgtcatagccgttccgttaaatcgacggccagttttcaatcctggaaagcgcctcgcaaagtgattctcaggtgaaggcacgacaacaaaagtattgtgataaaatcgccaacttctggtgtcacccaacaggaaaaatcatcatgagcctggccggtaaaaaaatcgttctcggcgttagcggcggtattgctgcctataaaacccctgaactggtgcgtcgtttgcgcgatcgcggggccgacgtccgcgtagccatgaccgaagcggcaaaagcctttatcaccccacttagcttgcaggcggtttctggttatcccgtttccgacagtttgctggacccggcagccgaagccgctatgggccatattgagctgggtaaatgggctgatttagtgattctcgcccctgccacggcagatttgattgcccgtgttgctgccggaatggcgaatgacctggtatcgacgatttgtctggctacacctgcgcctgtagccgtgctccccgccatgaaccagcagatgtaccgtgccgctgccacgcagcataatttagaggtgcttgcttcccgtggtttgctcatctgggggccagacagtggcagtcaggcttgtggtgatatcggtcctgggcgaatgctcgatccgttaaccattgtggatatggcggtggcgcatttttcgcccgtcaacgacctgaaacatctgaacattatgattaccgccggtccgacgcgtgaaccgctcgatccggtgcgttatatctctaatcacagctccggcaagatgggttttgctatcgccgccgccgctgcccgtcgtggcgcgaacgtcacgctggtatcaggtccggtttcactaccgacgccaccgtttgttaaacgtgttgatgtgatgaccgcgctggaaatggaagccgccgtgaatgcttctgtacagcagcaaaatatttttatcggctgcgccgccgtggcggattatcgcgcagctaccgtggccccagaaaaaatcaaaaagcaggccacgcagggtgatgaattaacaataaaaatggttaaaaaccccgatatcgtcgcaggcgttgccgcactaaaagaccatcgaccctacgtcgttggatttgccgccgaaacaaataatgtggaagaatacgcccggcaaaaacgtatccgtaaaaaccttgatctgatctgcgcgaacgatgtttcccagccaactcaaggatttaacagcgacaacaacgcattacaccttttctggcaggacggagataaagtcttaccgcttgagcgcaaagagctccttggccaattattactcgacgagatcgtgacccgttatgatgaaaaaaatcgacgttaagattctggacccgcgcgttgggaaggaatttccgctcccgacttatgccacctctggctctgccggacttgacctgcgtgcctgtctcgacgacgccgtagaactggctccgggtgacactacgctggttccgaccgggctggcgattcatattgccgatccttcactggcggcaatgatgctgccgcgctccggattgggacataagcacggtatcgtgcttggtaacctggtaggattgatcgattccgactatcagggccagttgatgatttccgtgtggaaccgtggtcaggacagcttcaccattcaacctggcgaacgcatcgcccagatgatttttgttccggtagtacaggctgaatttaatctggtggaagatttcgacgccaccgaccgcggtgaaggcggctttggtcactctggtcgtcagtaacacatacgcatccgaataacgtcataacatagccgcaaacatttcgtttgcggtcatagcgtgggtgccgcctggcaagtgcttattttcaggggtattttgtaacatggcagaaaaacaaactgcgaaaaggaaccgtcgcgaggaaatacttcagtctctggcgctgatgctggaatccagcgatggaagccaacgtatcacgacggcaaaactggccgcctctgtcggcgtttccgaagcggcactgtatcgccacttccccagtaagacccgcatgttcgatagcctgattgagtttatcgaagatagcctgattactcgcatcaatctgattctgaaagatgagaaagacaccacagcgcgcctgcgtctgattgtgttgctgcttctcggttttggtgagcgtaatcctggcctgacccgcatcctcactggtcatgcgctaatgtttgaacaggatcgcctgcaagggcgcatcaaccagctgttcgagcgtattgaagcgcagctgcgccaggtattgcgtgaaaagagaatgcgtgagggtgaaggttacaccaccgatgaaaccctgctggcaagccagatcctggccttctgtgaaggtatgctgtcacgttttgtccgcagcgaatttaaataccgcccgacggatgattttgacgcccgctggccgctaattgccgcgcagttgcagtaatatgacgccggatgaattttcatccggcgagtttctttaaacgccaaactcttcgcgataggccttaaccgccgccagatgttccgccatttccggcttctcttccaggtaagcaatcagatctttcagggtgatgatagagatcactttgcagttgtaatcacgctcaacttcctgaatcgccgaaatctcgccgcgcccccgttcctgacgatcgagcgaaatcaacacgccagcaagcgtcgcgccattggcctgaataatttccatcgactcacgaatcgccgttccggcggtgatcacatcatctaccagcattacgcgtccttgtaacgcgctaccaaccagattgccgccttcaccgtggtcttttgcctctttgcggttaaagcagtacggcaggtccaggtcatgatgctccgccaacgccacggcggttgtggtggcaatcgggatccctttgtaagcagggccaaacagcagatcgaactcaatgccggagtccaccaatgcttcagcgtaaaaacggcctaacagtgccaggtcgcgcccggtattaaacagcccggcgttgaagaaataggggcttttacgcccggatttcagcgtaaactcgccaaactttaacacctgcttgctaagcgcaaattcaataaactggcgctgatatggtttcatgccttcgctcctcatcttacttttctacagacaaaaaaaagcgactcatcagtcgccttaaaaatcagtttgccagcgccgccttctgcgtcgctacaatggattcgattccccctcgggccagcgccaacaaggtgagtagctcttcatgggtgaacggctcgccttctgccgtcccctgcacttcaatgatgcgcccgtcttcggtcatcactacgttcatgtcggtctctgcggcagagtcttcaacgtattccagatcgcaaaccgcttcgccgttcacaatcccgacagaaaccgcggctaccatccctttcatcgggttggttttcagcttgccgttttccaccagcttctgtagcgcatctgccagcgccacacaggcacccgtaatcgaagcggtacgcgtgccaccatcagcctgaagcacgtcgcagtccagcgtaatggtgaactcacccagcgctttcaaatctactgccgcgcgaagcgcacgggcgatcagacgctggatttccattgtgcgtccaccctgcttacctttcgccgcttcacgagcgttacgagtgtgggtagaacgtggcagcatgccgtactctgcggtgatccagccctggccctgacctttcaggaagcgcggcacgccttcttcaatagaggcggtacacaacactttggtatcgccaaattcgaccagcaccgagccttctgcatgttttgtatagttacgagtcagggtaacgggacgcacctgattattgctacggcctgctggacgcatattgaaatctccggcttgaaacaaatgtggctgcgcattatacggacttccggcggttattcctatcctgacaaggcatcgatggctataatccttccacctctccttttataaacaggaacgtctatgatccgcagtatgaccgcctacgcccggcgtgaaatcaagggtgaatgggggagcgcaacctgggaaatgcgctcggtaaaccagcgttatctggaaacttactttcgtctgccggagcagttccgtagccttgaacctgtcgttcgcgagcgtattcgttctcgcctgacgcgcggtaaagtggaatgtaccctgcgctatgagccagatgttagcgcgcaaggtgagctgatcctcaacgaaaaactggctaaacagctggtaactgccgcgaactgggtaaaaatgcagagtgacgaaggggaaatcaacccggttgatattctacgctggccgggcgtgatggcagcccaggagcaggatcttgacgccattgccgctgaaattctcgcggcgctggatggtacgctggacgactttattgtcgcgcgcgaaaccgaaggtcaggcactgaaagcattgatcgagcagcgtctggaaggcgtcaccgccgaagtggtcaaagtccgctcccatatgccggaaatcctgcaatggcagcgtgaacgcttggtcgcgaagctggaagatgctcaggttcagttggaaaacaaccgtctggagcaggagttggttctgctggcacaacgaattgacgttgccgaagaactggaccgcctcgaagcgcatgtcaaagagacctacaacattctgaagaaaaaagaagccgttggtcgtcgtctggactttatgatgcaggagttcaaccgcgagtcgaacactcttgcgtcgaagtctatcaatgccgaagtgacaaactccgcgattgagctgaaagtgttgattgagcagatgcgcgagcagattcagaatattgaataactcgtaacgccaattcttacttttcagccttcacaaatgccgcccactcaaacagagcggcatttttcttccccgcaactttcaattctgtttttcgtgcctgctccagattttgcgatgtttttttgcccagcacactgagaacgtgagatactcacaactgtatataaatacagttacagatttactttctttgcaattgatatcacatggagtgggcaatgaacgaacatcatcaaccttttgaagagataaaactgattaatgcaaacggagcagaacaatggtcagcaagacaacttgggaaactactgggttattcagagtatcgtcactttatacctgtattaacgcgcgccaaagaagcctgtgagaacagtggtcacacaattgatgaccatttcgaggagatcctcgatatggtcaaaattggctcaaatgccaaaagagcattaaaagacatcgtactctcccgctatgcctgttacctggtagtacaaaacggcgaccctgcgaaaccggtcattgcggcagggcagacttattttgctatccagacccgacggcaggagcttgctgacgatgaagcatttaagcaacttcgtgaagacgaaaagcgtctgtttctgagaaatgagttgaaagaacataacaaacaattggttgaggcagcacagcaagctggggtagcgacagctactgatttcgccatatttcagaatcatggttaccaggggctgtatggtggattagatcagaaagctattcatcagcggaaggggctgaaaaagaatcagaagatcctggatcatatgggttcaacagaactggcggctaatctctttcgagctacccaaacagaagaaaaactcaagcgggatggcgtgaattcaaaacagcaagctaataccacacactttgacgtgggtagcaaggtgatgcaaaccattcaggaacttggcggaaccatgcctgaggagttgccgaccccgcaggtcagcatcaagcagttggaaaacagtgtaaaaattacagagaagaaatagcagaaactaaaaactctttttgttgattgagatacccgatgcgtaagccaaagtccaggtgcggtgaacacaatggctaaacattgcacctttcttttccacccctcaattttaacctattttttcttatgcattttctcagacaagaagtcagaagaatgcatctacgctacagaaaatagcgatttcacataactacaagttatcaatttcctctcaccttaaaaaatctcaatcgtgacaatacgcacaaatcgctaccctgccagacagatttttagggagagaaccatgctgttacacattttgtatttggttggcattactgccgaagccatgacgggggctctggcggccgggcgacgccgcatggatacatttggcgtaattattattgcgaccgccaccgcaattggcggagggtcagtgcgcgatattctgctgggccactatccgctcggctgggtcaaacacccggaatatgtgattatcgtcgctaccgccgcagtactcaccactatcgttgctcctgtaatgccttacctgcgcaaagtgtttctggtgctcgatgcgcttggactggtggtcttttctatcatcggcgcacaggttgcactggatatggggcacggcccaattattgccgttgtcgcggcggtaaccaccggcgtgtttggcggcgttttgcgcgatatgttctgtaaacgtatcccactggtattccagaaagagttgtatgccggtgtctcatttgcctccgccgtgctgtacatcgcgctgcaacactatgtttctaaccatgatgtggtaattatctccaccctggtattcggcttttttgcccgcttactggcgctacgccttaagctgggattaccggtcttttactacagccacgaaggacactaaggttcaaaacctgtgatctgctgggcagccagccaactgcccagcttcttgatttgcgcattttccttccattcaataacctgtctggcgcgtcccgatccagtccccggcagctgctgccagaactgctccgtgctaaataaaagttgcgaccaggaccgttcatcactggcattaagcgccgcccgggttagcggtattcccattgccatcacccagcgagtaaaaggctgcttacgagccagattaaactgatgccatagctgcgcacttttacttttcgcgatccccggcgtgttctgtaattgctctggcgttaataaaagccaggaaaagatatgttcaaagcgatgagtctgatgcagcgcgcgccaaccggcctcaccaatgccatccagccccagaacctgttttgaccccagccagactaagcgtgaaatgaactgttcctgacaaacatcagaagcaaagtagcaggtcaacgagttaaagcggttttctggtggtgtcggttttgtacgttctgcaccgcgccagaccacatcatcaatgcgaggaataccctgaccggcaaggctgacgaggatctgatcaccaggcgcaatatcccactcctgccagcgcctgacggaaccaatattcacccgctggacttttttatcatccagcatgacaggtgcgagtgacgcaaccaccgatattttaccgctcttacccaccgcaaactgaatcgccttcacttcggcaacctgagctacaggttgatatttccaggccaccagccactctgcctggcccggtagccaatggcgggattctggctctttcgccgctcgtacaactacgccatcggtgacgaagggtaattccgctttccaccactcattgcgtacgcgcgcaacttcatcagcatttttcaccgcacgggtatacgtctgcgttagagtaaaacctgcggtagccagctcttttaaacgatcagacattaactgcggtccatccggccatgcccagacaaaaacgcccagagaattcagcgtgtcgctatcgtcctggcgcatcatcaagccagcaacttttgcgcgggcatttattccccccatttgttgttggatatgcccctcgcgctggagaaatatttccccctgaagcgtactgttggctaaaggcccgctaacggtttgcggcacagcggaaattaagctaactttctgcgtccagtcctcgcctttcaggccattaccgcgactgattgctttgttcagtttcccgtcccgataaaccagggttaccgcaacgccatcaacttttggctgcacccaaagatcgctacgttctcgcatccacagacttaatgcgtttttatccaccattttgcgtacacccgtatgggcaaccggatgcataaccgcaccatttaaaggcggcatcatcacgtcgcggggctcgctcccaaagcagcgttgccactgcgtaagacgggcgcttaactgatcgtaaacaccgtcttccacctcactttttccttccttccagtagtcatcgtcccactgttttatttgctgttgcaggcgggaaatttcttcctgtgctctggctggcgaccaggccggacagaccgcccacacagatgattgccagcacaagatacttattaatatcgccatccatactttcatcatcacctccgctgtaggtagtcaggcagatatacaacgtgatgaaagcaaagccgagtggcaaaaacggagtctgcgaggacgcttcctgaaaatcgtctttattgcagtgaatgacaggcaaatgcggaagcagctacgcaaaacgcaacaactttgcgcaaaaagtgtgagcaagggctacgtcacatggccgcgccgtgtataataagctcgtatgtaggctttatttcgctaatcacatacgaaagatactcatggctcaaggcacgctttatattgtttctgcccccagtggcgcgggtaaatccagcctgattcaggctttattaaaaacccaaccgttgtatgacacccaggtttctgtttcacacaccacacgccaaccgcgtcctggtgaagtccacggtgaacattatttctttgttaatcatgatgaatttaaagaaatgattagcagagatgcgttcctcgaacacgcagaagtttttggtaattactatggcacttcgcgtgaggccattgagcaagtactggcgaccggtgtcgatgtttttctcgatatcgactggcagggcgcgcagcaaattcgccagaagatgccgcacgcccggagtatctttattttaccgccgtccaaaattgaactggaccgccgtctacgcggtcgcggtcaggacagcgaagaggtcattgcaaagcgtatggcgcaagctgttgcagaaatgagccattacgccgaatatgattatctgattgtgaatgatgacttcgataccgcgttgaccgatttgaagaccattattcgcgccgaacgtctgcgcatgagccgccaaaagcagcgtcatgacgctttaatcagcaaattgttggcagactgaacctgatttcagtatcatgcccagtcatttcttcacctgtggagctttttaagtatggcacgcgtaactgttcaggacgctgtagagaaaattggtaaccgttttgacctggtactggtcgccgcgcgtcgcgctcgtcagatgcaggtaggcggaaaggatccgctggtaccggaagaaaacgataaaaccactgtaatcgcgctgcgcgaaatcgaagaaggtctgatcaacaaccagatcctcgacgttcgcgaacgccaggaacagcaagagcaggaagccgctgaattacaagccgttaccgctattgctgaaggtcgtcgttaatcacaaagcgggtcgcccttgtatctgtttgaaagcctgaatcaactgattcaaacctacctgccggaagaccaaatcaagcgtctgcggcaggcgtatctcgttgcacgtgatgctcacgaggggcaaacacgttcaagcggtgaaccctatatcacgcacccggtagcggttgcctgcattctggccgagatgaaactcgactatgaaacgctgatggcggcgctgctgcatgacgtgattgaagatactcccgccacctaccaggatatggaacagctttttggtaaaagcgtcgccgagctggtagagggggtgtcgaaacttgataaactcaagttccgcgataagaaagaggcgcaggccgaaaactttcgcaagatgattatggcgatggtgcaggatatccgcgtcatcctcatcaaacttgccgaccgtacccacaacatgcgcacgctgggctcacttcgcccggacaaacgtcgccgcatcgcccgtgaaactctcgaaatttacagcccgctggcgcaccgtttaggtatccaccacattaaaaccgaactcgaagagctgggttttgaggcgctgtatcccaaccgttatcgcgtaatcaaagaagtggtgaaagccgcgcgcggcaaccgtaaagagatgatccagaagattctttctgaaatcgaagggcgtttgcaggaagcgggaataccgtgccgcgtcagtggtcgcgaaaagcatctttattcgatttactgcaaaatggtgctcaaagagcagcgttttcactcaatcatggacatctacgctttccgcgtgatcgtcaatgattctgacacctgttatcgcgtgctgggccagatgcacagcctgtacaagccgcgtccgggccgcgtgaaagactatatcgccattccaaaagcgaacggctatcagtctttgcacacctcgatgattggcccgcacggcgtgccggttgaggtccagatccgtaccgaagatatggatcagatggcggagatgggtgttgccgcgcactgggcttataaagagcacggcgaaaccagtactaccgcacaaatccgcgcccagcgctggatgcaaagcctgctggagctgcaacagagcgccggtagttcgtttgaatttatcgagagcgttaaatccgatctcttcccggatgagatttacgttttcacaccggaagggcgcattgtcgagctgcctgccggtgcaacgcccgtcgacttcgcttatgcagtgcataccgatatcggtcatgcctgcgtgggcgcacgcgttgaccgccagccttacccgctgtcgcagccgcttaccagcggtcaaaccgttgaaatcattaccgcaccgggcgctcgcccgaatgccgcgtggctgaactttgtcgttagctcaaaagcgcgcgccaaaattcgtcagttgctgaaaaacctcaagcgtgatgattctgtaagcctgggccgtcgtctgctcaaccatgctttgggtggtagccgtaagctgaatgaaatcccgcaggaaaatattcagcgcgagctggatcgcatgaagctggcaacgcttgacgatctgctggctgaaatcggccttggtaacgcaatgagcgtggtggtcgcgaaaaatctacaacatggggacgcctccattccaccggcaacccaaagtcacggacatctgccaattaaaggtgccgatggcgtgctgatcacctttgcgaaatgctgccgccctattcctggcgacccgattatcgcccacgtcagccccggtaaaggtctggtgatccaccatgaatcctgccgtaacatccgtggctaccagaaagagccagagaagtttatggctgtggaatgggataaagagacggcgcaggaattcatcaccgaaatcaaggtggagatgttcaatcatcagggtgcgctggcaaacctgacggcggcaattaacaccacgacctcgaatattcaaagtttgaatacggaagagaaagatggtcgcgtctacagcgcctttattcgtctgaccgctcgtgaccgtgtgcatctggcgaatatcatgcgcaaaatccgcgtgatgccagacgtgattaaagtcacccgaaaccgaaattaatgttttatgaacccaacacgttatgcacgcatctgcgaaatgctcgccaggcggcagcctgacctgaccgtctgcatggagcaggtccacaaacctcataacgtttctgcgattattcgtaccgcagatgccgttggcgtacatgaagttcacgccgtctggcctggtagccggatgcgcaccatggcttcggcagcggcgggtagtaacagctgggtacaggtgaaaacacaccgcaccattggcgatgccgtcgctcatctgaaaggccagggcatgcagattctggcaacccatctttctgataatgctgtcgatttccgcgaaattgattacactcgcccgacctgcattttgatgggacaggagaaaacgggcatcacgcaggaagcattggccctggcggatcaggacatcatcattccgatgatcggcatggtgcagtcgctgaatgtttccgttgcctcagccctcattctttacgaagcccagcgtcagcggcaaaatgcaggcatgtacctgcgtgaaaacagcatgttgccggaagcagagcaacaacgcctgttgtttgaaggcggctatccggtgctggcgaaagtcgcaaaacgcaaaggcctgccttacccccacgtcaatcagcaaggcgagatcgaagctgatgctgactggtggtccaccatgcaggccgcagggtaagcgccatgaaaggccgcctgttagatactgtcccgctcagttccctaacgggcgttggcgcagcgcttagtaacaaactggcgaaaatcaacctgcataccgtgcaggatttactcttacaccttcccctgcgctacgaagatcgcacccatctctaccccatcggagaactactgccgggcgtttatgccacggtggaaggcgaagtgctgaactgcaatatctccttcggcggtcggcggatgatgacctgccagatcagcgacggttccggcatcctcaccatgcgctttttcaatttcagcgcggcaatgaaaaatagcctggcgacgggccgccgtgtactggcttatggcgaagcaaagcgcggtaaatatggtgcggagatgatccacccggaataccgcgtgcagggcgatctcagcacgccagaattacaggaaacgctcacgccggtttatccaacaacggaaggcgtaaagcaggccacgctgcgtaaattaaccgaccaggcgctggatctgctcgacacctgcgccattgaagaactcctgccgccggaactgtcacaaggaatgatgacgctaccggaagcgttgcgcactttgcaccgcccgccaccgacgctacagcttagcgatctggaaaccgggcagcatccggcgcaacgtcgtctgattctggaagaactgctggcgcacaacctcagcatgttagccttacgtgccggagcacagcgttttcatgcccagccgctgagcgccaatgacacgctgaaaaataaactcctcgccgccttaccgttcaagccaacgggcgcacaggcacgcgtagtggcggagatcgagcatgatatggcgctggatgtgccgatgatgcgcctggtacagggcgatgtaggttccggtaaaacgctggtcgccgccctcgccgcgctgcgtgcgattgcccacggcaaacaggtggcactgatggcaccaaccgaattactcgccgagcagcacgccaataacttccgcaactggtttgcaccgctcggtatcaaagtgggctggctcgccggtaagcagaaaggcaaagcgcgactgtctcagcaggaagccatcgccagcggtcaggtgcagatgattgtcggtacacacgccatcttccaggaacaggtgcagtttaacggcctggcgctggtgattatcgacgaacagcatcgttttggcgtgcatcagcgtctggcattgtgggagaaaggccagcagcagggcttccatccgcatcagttgatcatgaccgccacgccgatcccccgcacgctggcaatgacggcgtatgccgatctcgatacctcggtgatagatgagctgccgccaggccgcacgccagtgactacggtcgctattcctgatacccgccgtaccgacatcattgaccgcgtgcgccacgcctgcataactgaaggtcgtcaggcgtactgggtttgtacgttgattgaagagtcagagttactggaagcgcaggcggcggaagctacctgggaagagttgaaactggcgctaccagaattgaatgttggcctggtacacgggcggatgaaaccagccgagaaacaggcggtgatggcgtcgtttaaacaaggtgagctacatctgctggttgccactaccgttattgaagtcggtgttgatgtgcctaacgccagcctgatgattatcgaaaaccctgagcgtctgggtctggcgcagttacaccagctgcgcgggcgcgtaggtcgtggcgcggtggcttctcactgcgtgctgctctacaaaacgccgctttctaaaacggcgcaaattcgcctgcaagtgctgcgcgacagtaacgacggttttgtgattgcgcaaaaagatctggagattcgcggccctggcgaattgttaggcacgcgtcagacgggtaatgctgaatttaaagtggcggatttactgcgcgatcaggcgatgatcccggaagttcagcgcctggcgcgacatattcacgaacgttacccacaacaggcaaaagccttgatagaacgctggatgccggagacagaacgttactcgaatgcgtaaaaggcggcagtgagaagaccgccatttcaggttaccctaccttcctgccggatgcgattcaccctacaaattcaataaattatgaatcaatacgcaggcttgataagcgaagcgtatcaggcatttgtctttgttgcggcggcacttctaccgccgcttcatcggttaaccggcaaaaatcggcaacatcaaatacaacttaattaccagcgcattgacgatatcgataaagaacgcaccgaccatcggcaccaccaaaaacgccatgtgcgacgggccaaagcgttcagtgatcgcctgcatgttggcgattgccgttggcgttgcaccgaggccaaaaccacagtgacccgcagccagcactgccgcatcgtagtttttgcccatcatgcgccaggtaacgaagatggcatacaacgccatgaagatggtctgtaccaccagaatcgccagcatcggcagcgccagcgaagccagctcccacagtttcagccccatcaacgccatcgccaggaacaacgacaagcttacgttacccagcacggataccgcacgctcaaagacgcggtaaaagcccattattgacagaccgttgctcagaatcacgccaacaaacagtacacagacgaaggtcggcagttcaaaagcagtgccagccaaaagttgcgcaacaattttccccaccgtcaggcagatagcaatcagcgcgatagtttcaatcagcaccaacgaggtgatcatgcggcccacatccggcttttcaaacgccgtcgggacttcctggtcatccggaataccgttcggcgtggtggagtgtttcaccagatagcgcgccaccggaccgccaatcaagccgcccagcaccagaccgaacgttgcacaggccatcgccacttccgtcgcattggtgaagccataacgttcaatgaacaatttactccacgcagcgcccgtaccgtgaccgccggaaagcgtaatagaaccggccaacagccccatcagcggatcaagccctaacaggctagccataccaatgccaatggcattttgcatcaccaacagaccaacaaccacaatcaagaagatgccaaccacacgcccaccggcacgcaaactggcaatgttggcgttcaggccaatggtggcgaagaaagccagcattaacggatcgcgcagggacatatcaaagttgacttcccagcccatgctttttttcagtactagtagcgccagcgccaccaacaaaccacccgcaacaggttccggtatggtgtatttcttcaaaaaggagacggaatggaccaacttacgcccgagcagcaacgtcagcgttgcggcaacaagcgttgctaaagtatcgagatgaaacatagttactcctttgtatccgcatcactctttcatactcgtcatacttcatcgcgcagtggcaacttcatgaactatgacgggtatcgagttatgctttcctgggtcaaattctcagctgttaatgaacaaatggcatggattttaagcagaaaaataccaaaagttatataaaaaagtgcatttatctcatttaaatatttagatgaggatgtggcaaacgtttgcttttctctttcggtcagctaaaatgcccgctttgctaccacgggattgttttcgatgtctgtttccaccctcgagtcagaaaatgcgcaaccggttgcgcagactcaaaacagcgaactgatttaccgtcttgaagatcgtccgccgcttcctcaaaccctgtttgccgcctgtcagcatctgctggcgatgttcgttgcggtgatcacgccagcgctattaatctgccaggcgctgggtttaccggcacaagacacgcaacacattattagtatgtcgctgtttgcctccggtgtggcatcgattattcaaattaaggcctggggtccggttggctccgggctgttgtctattcagggcaccagcttcaactttgttgccccgctgattatgggcggtaccgcgctgaaaaccggtggtgctgatgttcctaccatgatggcggctttgttcggcacgttgatgctggcaagttgcaccgagatggtgatctcccgcgttctgcatctggcgcgccgcattattacgccgctggtttctggcgttgtggtgatgattatcggcctgtcgctaattcaggttgggttaacgtccattggcggcggttacgcagccatgagcgataacaccttcggcgcaccgaaaaatctgctgctggcaggcgtggtcttagccttaattatcctgcttaaccgtcaacgtaacccttacttacgcgtggcctcactggtgattgcgatggcggccggatatgcgctggcgtggtttatgggcatgttgccagaaagcaacgaaccgatgacgcaagaactgattatggtgccaacgccgctctattacggtcttggcattgaatggagtctgctgctgccgctgatgctggtctttatgatcacttcgctggaaaccattggcgatatcacggcgacctctgacgtttccgaacagccagtgtccggtccgctgtacatgaaacgcctgaaaggtggcgtgctggcaaacggcctgaactcgtttgtttcggcggtgtttaacaccttcccgaactcctgcttcgggcaaaacaacggagtgatccagttgactggtgttgccagccgctatgtcggttttgtcgtcgcgctgatgttgatcgtgctgggtctgttcccggcagtgagcggttttgtacaacacattccagaaccggttctgggcggcgcaacgcttgtaatgtttggcaccatcgccgcctccggtgtgcgtatcgtttctcgtgagccgctgaaccgtcgggcgattctgattatcgcgctgtcgctggcggttggtctgggcgtgtctcagcagccgctgattttgcagtttgcccctgaatggctgaaaaacctgctctcctccgggatcgccgcgggcggtattactgccatcgtgctgaatctgattttcccaccagaaaaacagtaattcactggcggcggtaagataattaccgccgcagtctcacctctttcaccattcccgccttgaggattgcgcgtaaatcgtgcataactcccttatgtgcatttcacgggatggaagaccatgaaatttattgggaagctgcttctctacattctcatcgctctgttagtggtgatcgctggcctctattttcttctgcaaacccgctggggagcagaacatatcagcgcatgggtttccgagaatagcgactatcatctggccttcggggcgatggatcaccgtttttccgcgccatctcatatcgtgctggagaatgtcacgtttggtcgtgatggccagcccgcgaccctggtggccaaaagtgtcgacattgcgctaagtagtcggcaactgaccgaaccacgccatgtcgataccatcctgctggaaaacgggacgctgaatctcaccgaccagaccgcgccgctaccgttcaaagccgatcgtctgcaactgcgtgatatggcgtttaatagcccgaatagcgaatggaaactgagcgcgcagcgggtaaatggcggcgtggttccgtggtcaccagaagccggtaaagtgctgggtacgaaggcgcagattcagtttagtgccggatcgctttcgctcaatgatgttcctgccaccaatgtactgattgaaggcagtattgataacgatcgcgttacgctgactaacctgggtgccgacatcgcgcgcgggacattaaccggaaacgcgcagcgtaacgccgacggcagctggcaagtggaaaacctgcgcatggcggatatccgtctacaaagcgaaaaatcgctaaccgacttctttgcgccattacgctctgtcccgtcgttgcagattggtcgcctggaagtgatcgatgctcgtttgcaaggtccggactgggcggtgaccgacctcgatctcagcttgcgcaacatgaccttcagtaaagatgactggcagacacaagaaggcaaactgtcgatgaacgctagcgagttcatttatggttcgctgcatttatttgacccgattataaacgcggaattttccccgcagggcgtagcgctgcgccagttcaccagccgctgggaagggggtatggtcagaacgtcagggaactggctgcgtgacgggaaaacgttgatccttgatgatgcggcaattgccgggctggaatataccttgccgaaaaactggcaacagttgtggatggaaacgacacccggttggttaaacagcctgcaactgaagagatttagcgccagccgcaatctgatcattgatatcgaccctgacttcccgtggcagctcaccacgctcgatggttacggtgccaacctgacgctggttaccgatcataaatggggcgtctggagtggctcggcgaatctgaatgccgccgccgcgacattcaatcgtgttgatgttcgtcgcccgtcgctggcgctgaccgccaacagcagcacggtgaatatcagcgaactgagtgcatttactgaaaaaggcattctggaagccaccgccagtgtttcacaaacgccacaacgtcagacccatatcagcctgaatggacgcggtgtgccggtgaatattttgcaacaatggggatggcctgaattaccgttgactggcgacggcaatattcagcttaccgccagtggagatattcaggccaatgccccgctgaaacctacggttagcgggcaattgcatgccgtgaacgccgcaaagcagcaagtgactcaaaccatgaatgcgggcgtcgtttccagcggtgaagttacatcgacggagccggtgcagtaaacatcaatctcgtcgggtacgactcagacgtacccggcattccatcaatagattacaacgtaattgtcagcgcattcccttgaggcttcaccaccagcccctgctcactttcagcctgcgaaccgccttgcagaccatttactttcacaacattgcgcaagcacagtgtccagttcctcgcctcgcccgcaccaatcacagtaatcgtgttaccagtacgtgttgcttttagagtaaagatcaccgaaccgtcagcagcgggcacttcacagacggcttcatgcccgtcttgctgattaaagaggtggaatgccgtgccttcgtgccacgcgtaatcgggacgttgatcgttgttgcccagcgccagtagagtgttatcacgcacataaacgggcagactcaggaagctgtgctgctgtttatgccagcgactaccgtcgagttcatcgttgtgccacaggtgtgtccagcgaccttccggcaggtagaactgcacatcgcccgcttcagtgaacaccggcgcaaccatcacgttgtcgcctaacatgtattgacggtcaaggtaatcacaagccggatcgtccgggaactccatcatcatggcccgcatcatcggcgtaccccgcgtgtttgcacgcgcagcttcacgatacagatacggcatcatgcggcatttcagttgcgtgaagaagcgcaccacatcacaggactcatcatcgtaggcccacggcacacgataagatttgctgccatgtaaacggctatggctggagagcaaaccaaacgcgcaccagcgtttgtaaacgtgtgccggagcggtattttcaaagccgccgatatcgtggctccagaagccaaaacctgaaaggccaatagacaaaccaccgcgcaggctttccgccattgattcgtagttagcgtaacagtcaccaccccagtgtaccgggaatttctgcgcaccaacggaggccgagcgggcaaacaagacggcttcttcctcaccaacggtgtccttgagcacgttccacaccagttcgttgtagatgtacgcataatggttatgcattttctgcggatcggaaccgtcaaaccactgaacatcggttgggatacgttcgccaaagtcggtcttaaagcaatcaacgcccatcgcgaccagacctttcagtttgtcggcgtaccatgtgcaggcatccggattggtaaagtcataaatcgccagacctggctgccatttatcccactgccacagcgaaccgtccgggcgtttgagtaaatagcctttctcttgtaactctttaaagacgggggatttttgcccgatataggggttaatccagacgcagattttcagccctttcgctttcaggcggcggatcatcccttccgggtccgggaaagtcagcgggtcccactcaaaatcgcaccactggaaagctttcatccagaaacagtcaaagtggaaaacatgcagtggcagattgcgttccgccataccatcgataaagctgtttactgtcgcctcgtcgtagttggtggtaaatgaagtggttagccacagaccgaaggaccacgcgggcggcagcgccggacgaccagtaaagcgggtataacgatcaagtaccgctttcggcgtcggaccgtcgataacaaagtattcgagatattcactctcaacgctgaactgcactttggagactttctccgatcccacttcaaaagagacgcattggggatgattgaccagtaccccataaccacggttagtcatgtagaacgggatatttttatacgcctgttcagtacttgtgccgccgtcccggttccaggtctctaccgtttgaccattgcgcaccagggcagtgaagcgctctcccagaccataaactgtttcgccaacgccaagatccagccgctcaaacatataatttcgttgattattcgtgtcctgcacgtagccattatttttcacctgactaccggtaatacgttcgccgttgcgcagaaaatccagtgaccagaactcacctttgctgacacgcgcacttaagttgccacttttaaactcagcataacgctctgtgttttcgattgtgaccttcacgtcctgcaaaatattgagtgggtaatgaggaccgttattcagcgccccctgaaaatgctcaatccgtacaccgacaataccttcctgtggggagaaaaagcgcagcgtaaataaaggcgtatcaagctgccaggtacgttcacgcacatcacggggggcagcatagaccaccatttcattaccctgctgttcaacctcgaacacctgaagcgggtgaatcaaattgaggccaggttgaatcaaccagtttccatcgctaattttcattgccgttccttagttctgcacttcttgagaggtgaattgttgctggcaacggcgtttgccctgggccagctgttccataacggttttcagattgtgcgtcgtgagtgagtagtagcgtttagcgataatcgcgctcagcaaataacagatcgccggaacaatcgtgaatagcgcaataatgatgctaatcgtggcgctgttctgcgctttttctgccgcatcatatccgccataagccagcatccagccgataagagcgccgccgaaggccaaccccagtttgagcacaaacagcgtgccagcaaaactgatcccggtcaggcgtttaccattgcaccactcgccgtagtcgacggtatcggacatcattacccactggataggtgtcaccagttgatgcaacacaccaatcacgaagatgaagacaaacatagtgatgctggcctgcatgggaacaaagaacatcgcgaggctaatcactgccagcagggcgttcgtccaccagaaaatagtgactttacatttccagtcggtcagcggttttgccagagcggaaccaatcaggttacccacgcaataagtggtgagaaaagcgacaaacacttccggcgtacccaaaatccatgtgacgtaatacatcatcgctccaccgcgtacgcacaccgccaggatattgaaaatggttagtaaaccgacaatccgccactggtcgttttgccagatatcacgtaaatcttcccgcatagacgtcgttgtaggtggtgcttcaacgcgttctttagtggtgaagaaacagaatgccagcatcatgaatgccaccacggaaaggaccgcgataccaccctggaaaccgagtggtttattatcaccaccaattaaattaaccagtggcatcatcagaaccgtagaaagcatgcctcccgcggtcgccagcacaaaacgccaggattgcagcgagatacgctgagtcgggtcattggtgattacaccacccaatgcgcagtaagggatattgacgacggtataaagtaaggtaagtagggtgtaagtaattgctgcataaatcatttttccgttcatactgagatctggcgtgctataggccagtacacagacgatcccaaatggcagtgcgccaaacagtacccacggacgaaatttaccccagcgagagcgcgttcgatcggccaacaaccccatgcaaggatcggaaatcgcatccagtgcacgagcgaccaaaaacatggttccgacaaatccggcaggaatgccaaaaatatcggtataaaagaacatcatatataacattacgttatcgaaaataatgtggctggcggcgtctcccatgccataaccaattttctctttaacggacaacacttcactcttcatctacttttccttgatgctataggggtgctgagaccgataacgcattttgtaaaccatccctgtgagagcgaatattccgatatctggttattaatttatgattcttgttttatgtgatcgtggtagcgttaattccgctcatatatcattgtaaaatatggattttatatgaactataatgctttcgtgataatacgctgcgtgtattaggcggaaaaaactgatctgggggatgtagaaactcaaggaagtagctataatgcgccccgcctccatgtagcaatcgaggcgcggaagatcgtcgtctccggtgaggcggctggacttcaaatccagttggggccgccagcggtcccgggcaggttcgactcctgtgatcttccgccaaaatgcctctcctgacgttctccaaccccttgtaatactgtcaatccagatattttctactgctcaatattcaatcggcttcaggaatacctggtctaaggttttgtgatggacgatgagcggctgaagaatccgcctgtcggttcttctgtcctcgaacgcatccgcgatattcacgccagtatgcgccgtgtttatttgcaggtgatttgcccccctgctgactctcagccaactgtatcgccattaaggtgaagatgttgttttactcgccccagaacacccttttttatacgactattctatttctttaaccgctggcgaaaaaaactgactataaacttcaccaataatcagactgccatcaagattaatttgttcatttaatatatcaaatcaacttgttttatttttactatcaaaaatagctcattgccttactataattaatatataaattcggtaattaattcttaacatgcttttactaacaatctcaattgctggccctataatattgcgctagcattgctttctggttgtatcagcgatactcaaaaattcttaatacaatactcattcgactggtacttatttgtaactcagttatattttttcgcccggtgattcagaagaatgcaaaaaacggctaccactccatcaaaaatacttgatctcactgccgcggcatttttacttgtcgcctttctgacgggtattgcgggcgctcttcagactcctaccctaagtatattcctcgcagatgaactgaaagcccgtcctataatggtaggttttttcttcaccggtagcgctattatgggaattctggtcagtcaatttctggcaaggcactccgataaacaaggcgaccgtaaattactgattctgctatgttgcttatttggagtgctggcctgcacgctttttgcgtggaatcgcaactacttcattctcctctcaacgggcgtacttctgagtagttttgcttccaccgcaaacccgcaaatgttcgccctcgcccgtgaacacgccgacagaacaggccgtgagacggtcatgttcagtacatttttacgtgctcagatctcgcttgcctgggttatcgggccaccgctcgcttatgaactggcaatgggatttagttttaaagtgatgtatctcaccgctgccatcgcatttgttgtttgcggactgatagtctggttgtttttgccatcaatacaaagaaatattcctgtcgttacccaacccgtagaaattttaccctccacccacaggaagcgggatacgcggctactttttgtggtctgttcaatgatgtgggcggcgaataatctctacatgataaatatgccgctatttattattgatgaactgcatctaaccgataaactggctggagaaatgattggtatcgctgccggtctggaaattccgatgatgttaatcgcaggctattacatgaaacgtattggcaagcgactattaatgctcattgctatcgtgagtggaatgtgtttttacgccagcgtactcatggcgacgactccggcggttgagctggaattgcaaattcttaatgccatcttccttggtattctctgtggtatcggcatgctttattttcaggacttgatgcctgaaaaaataggctctgcgacaacgttatatgcaaatacttcacgcgtcggctggattatcgccggctctgttgacggaattatggttgaaatctggagctaccatgcgttgttctggctggcgatagggatgttgggtattgcgatgatttgcctgctgtttattaaagatatttagctcaccagtctgggctaagaaaaatcggcgtggcgcaaacagagccatcctcgccatttttgctatcatgcctgcatacataaacgacaaaacagtatgcagagggaaaaatgggttccaccagaaaggggatgctgaacgttctgattgccgccgtgttgtggggaagttcaggggtctgcgcgcaatacatcatggagcaaagccagatgtcgtcgcagtttttgactatgacgcgtttgatattcgccggtttgattctactgacgctgtcatttgttcatggcgataaaatcttttctattattaacaatcataaagatgccattagcctgctgattttttccgtggttggcgcgctaactgtacagctcacttttttgctaaccatcgaaaaatcgaacgcagccacggcaacggtgctgcaattcctctcaccgacgattatcgtcgcctggttctcactggtgcgtaaatcgcgcccgggcattctggttttctgcgctattttgacatcgctggtcgggacttttttattggtgacacacggtaatccgacgtcattatcgatctctcctgccgcgttgttctggggcattgcctcggcatttgctgctgcattctataccacctatccctcaacgctaattgcccgctatggcacgttaccagtcgtcggctggagtatgctgattggcggtctgattctgttgcctttttatgccagacaaggaacaaactttgtcgttaacggcagtttgattctggcgtttttttatttggtggtcattggtacgtccctgacatttagtctgtacctgaaaggagcacaattaattggcggtccaaaagccagcattttgagctgtgcagaaccattaagtagcgcgctactctctttgctgttgctggggatcacgttcacattaccggactggctgggaacgctgctgattctgtcatcggtgattttgatttcaatggattcccgtcgccgcgccagaaaaataaatcgtccggcgcggcataagtgagaattaccagccaggcaccgcgccaccgttaaaaatggtttctgccgctttagcgacttcgggtgattgataagattgcagaaattccttcacgttttctgcattcttattatcttcccgtgccaccaaaatattcacatacggcgaattcttatcttcaataaatacgctgtcgtgcaccggagaaagcccggtctgctgaatgtaagtggtgctgataatcgctacatcaactttgggatcatccagtacgcgcgggagctgcgccccctcgagttccataatctgcaaatgacgaggattatcggttatatccagcgcggtaggtaataacccttttccctctttcagagtaattagcttctctttttgcaacagtaaaagtgcgcgaccaaggttggtcgggtcgttggggatcgccactgtcgcgccttcttttatttgcgccacggttttgatttttttggaataacccgccatagggaagacaaacgtatttcccaccgctaccagtttataaccatgcgcctgattatcttgttcaagaaagggtcgatgctggaagacattcgcatcaagttcgccatgatttgtcgcatcgttcggtagcaacgaaccgctaaatcctaccagttcaacatcgaggccatatttctcttttgccacctttttagcgacttccgcgacatcttgttctgcgccatttataacgccaactttaatgtgttttgcatcgctgctactctggtcgcaacctgccagcagaattccggccagcaataatgcggcccctgtccgtagatgatgtgttgtcagtttcatttttttatccttttattaatgattacctgactatagcggtaaggtcgctgcggtttaaaaaacgaaacgctatcgataagaataaaaaggaataaaagtggaatataaagtctggcacttcttactgaccacgcaagcgcgtttcgtacagcatgatgagagcgatgaaagcaaactacacttatgcttcattcgatacacatttgtaaaaggttgaatccatgaaaccaacgacactactgcttattttcacttttttcgctatgccaggcatcgtatacgccgagtcgccttttagctcactgcagtccgcaaaagagaaaaccacggtattacaagatttacgtaaaatttgcacgccacaggcgtcattatcagatgaagcgtgggaaaagttaatgttgtcagatgaaaacaataaacaacatatacgcgaggccatcgtggcgatggaacgtaataatcagagcaattattgggaagcgttgggtaaggtagaatgcccggatatgtaagaacagcaacaactactgaccaacgcttctttacctgatatcaggatttcttcattttcacctttgcagtaaccaacaatgcagtcagcaacatcaatgtgccggacaacatcaacggcgaagtcagaccaatattatccagcgcataaccgccgattgccgcgccacaggtattagcaagctgaataaccgccacctgaatagacccggctttttctgcctgatcggccagcgagcgggtgatccacgttgaccagccgacgggaaccaatgcaaaagttagcccccagataatcgccacgccggtagcaacgattttatcgcttccccacaacgtcagtaccaacgcactcacagccagtattaacggcgcgcctgctaaggccagttttaccgaacgtttaagaatgaacgacgaaagcgacgtaccaataaagctggcgataccaaaactcaacagcaccagcgttaagccatccacgccgaatcccgccaggttcatatacaccgggcgaatatacgtgaagaaagcaaactgcccggcgaaagacatgaagatggcgatcatccctgccatcacacccggacgttgtaataagcggaaagtattttgtttctgatgcgagggttcgcctggcagtgaaggcaatgatttgataatccagaaaatacacagcacgcccatcaccgccgccgcattaaagacattgcgccaaccgataagctcgcctaaaaaactgcccaacggcgcggcaatcaccagcgcaatagaaaccgcgccgaagatcaccgacagcgccttcggcaccgtacgcggcggcaccagacgcatggtcagcgacgccgacatcgcccagaacccgcccagcgccagccccagacaggcacgaccgattaaaagcaaactgaatgagttagcaaaggaaaccagcaagcaggagagcgtcagcaaaacggcaaacaaaataacaacgtagcggcggtcagtagcctgaattgtctgggtaataaacaaactggcaaacattgccacaaaggcggtcacggtcaccgattgcccggcaaccccttccgaaatgcctaaatcctgggccattggcgtcaacaaactgacgggcaaaaactcaacgataatcagacaggcgacacaaaacgccaccgagaaaacggctgaccagttcggtcgggtgatggcatccgcgccgcggttttcggcaataaattcactcatggtgttacccgtggcatgtttcaggggaaaagccgaccactttaacattgaaatgtgtgacgcatttaacgtttttgcaacttttacggtgttgcttgagctggagttaagatcgaaacggaacagggcaaagattaccggatgcggcgtgaacgtcttatccacccgacaggtcaggcgcggtctgtaggctgataagacgaaacggtttcaatgcaaccagtgaacgccctcggcaggctgaaagaacgcgttatagcgcatctgaaaagcattaatatcctgcatttcaggttcggtttcgcgcagaaaacctagcgccagcctgacctgagcgtcggtaatcggcgcggcgaggcgagctttttgtaaaatccgatgccattgcagcaggttctgttcgctaccatcgacaatgacaatttgccagatgagcaacacctgcgcggcgttttgcaggtgcgactcatccggacgatgcaaataacgtaaaaattcgtcaccagctgactttcccatttgatcgaccatcgactccacgggtacgacatcgatgttcagccgatcgctgagacggcgaatcgcttttctggccccggatgtcagcacccgaaaaccaaccacaaacactaccgccagcgtggcgagcattatccagatcatgagttctcctgcgtaatcagaactcatgatatctggaaaccctcgccagttactaatccaccagaataatcttcagtgcaaacagagctgcgaccaccaccacacacaggttcagatcgcgccagcgcccggtgcatactttcatgatgcagtacgacataaagccgagtgcaatcccttcggtgatcgagaaagtaaagggcatcatcaccgtggtaataaacgcaggcaccgattcggtaaaatcatcccagttaacgcgcgccaggctcgaagtcatcagcacgccaacaaagattaacgctccggcggttgcgtaaggaggaactatcgccaccagcggtgagaagaacataaccaacaggaacataacgccaaccacaaccgcagtcagccccgtgcggccaccgactgccacaccagaagtactttcaatataggcagtaacagacgaggtgccgataaacgcacccgccaccgaactgacgctatcaacatacagcgccttattcatattggggaatttaccgttaccatctattaagcccgctttatcagttacaccaattaatgttcctgatgaatcaaataggttgatcagcataaaggagaaaatgataccggcgagttcaagtgttaacgcgccgctcaaatctacttcaccaatgacgccgctaatatcaggcggaatggaatagacgccgctaaaatgaacatcaccgaaaaataatccacagcaagacgtcaccacaatagaaaccagcaccgcggcatgaaaatgacgtgatgacaacacggttataataaaaaaccctaaaatacctaacaacacgccgtgagaacttaaatcgccaatcatcaccagcgtgtctttattggcgacaataacgccagtattttttaatcccattaaggcgataaataatccaattccgctggtgataccaatacgtaaacttaagggaatgttggagatcatccagtaccggatacgaaacagcgtgagcaaaaatagtccaactgcgccccagaatattgcgcccatcccggtctgccaggagatgcccatcgcccccacgaccacgaaggcaaagaaggcgttcagccccattgccggagccagcgccacgggtaagttagcaaatatccccatcgcaatactgccgataccggcaatcaaacaggtggtaacaaacaccactttcgggtccatttgtgccgcgccgaggatttgcgggttcacaaaaacgatgtacaccatggttaaaaaagtggtcatccccgcaatcaattctgtgcggacggtggtcccatgctgaggtagtttaaataatcgcgaaagcgtccctgattcattactcacgtaatcggtattgtcattattcatttttttgtccattggaggagatttaatcccttgcttttgtaaaacaaatgacaacaacggttcagtgataattatcacatttcaattgcacattaatggatattctttaataatctcgcgacgtttctttatgataaataataatcaaattgataaaatcaaaatgagaaaaatatgaataattctattaaccataaatttcatcacattagccgggctgaataccaggaattgttagccgtttcccgtggcgacgctgttgccgattatattattgataatgtctctattctcgacctgatcaatggcggagaaatttccggcccaattgtgattaaaggacgttacattgccggtgttggcgcagaatacactgatgctccggctttgcagcggattgatgctcgcggcgcaacggcggtgccagggtttattgatgctcacctgcatattgaatccagcatgatgacgccggtcacttttgaaaccgctaccctgccgcgcggcctgacgaccgttatttgcgaccctcatgaaatcgtcaacgtgatgggcgaagccggattcgcctggtttgcccgctgtgccgaacaggcaaggcaaaaccagtacttacaggtcagctcttgcgtacccgccctggaaggctgcgatgttaacggtgccagttttacccttgaacagatgctcgcctggcgggaccatccgcaggttaccggccttgcagaaatgatggactaccctggcgtaattagcgggcagaatgcgctgctcgataaactggatgcatttcgccacctgacgctggacggtcactgcccgggtttgggtggtaaagaacttaacgcctatattactgcgggtattgaaaactgccacgaaagttatcagctggaagaaggacgccggaaattacaactcggcatgtcgttgatgatccgcgaagggtccgctgcccgcaatctcaacgcgctggcaccgttgatcaacgaatttaacagcccgcaatgcatgctctgtaccgatgaccgtaacccgtgggagatcgcccatgaaggacacatcgatgccttaattcgccgcctgatcgaacaacacaatgtgccgctgcatgtggcatatcgcgtcgccagctggtcgacggcgcgccactttggtctgaatcacctcggcttactggcacccggcaagcaggccgatatcgtcctgttgagcgatgcgcgtaaggtcacggtgcagcaggtactggtgaaaggcgagccgattgatgagcaaaccttacaggcggaagagtcggcgagactggcacaatccgctccgccatatggcaacaccattgcccgccagccagtttccgccagcgactttgccctgcaatttacgcccggaaaacgctatcgggtcattgacgtcatccataacgaattgattacgcactcccactccagcgtctacagcgaaaatggttttgatcgcgatgatgtgagctttattgccgtacttgagcgttacgggcaacggctggctccggcttgtggtttgcttggcggctttggactgaatgaaggtgcgctggctgcgacggtcagccatgacagccataatattgtggtgatcggtcgcagtgccgaagagatggcgctggcggtcaatcaggtgattcaggatggcggcgggctgtgcgtggtacgtaacggccaggtacaaagtcatctgccgttacccattgccgggctgatgagcaccgacacggcgcagtcgctggcggaacaaattgacgccttgaaagccgccgcccgtgaatgcggtccgttacccgatgagccgtttattcagatggcgtttctttctctgccagtgatccccgcgctaaaactaaccagtcaggggctatttgatggcgagaagtttgccttcactacgctggaagtcacggaataataaaaaaagcccggcgtcatgccgggcaaaagtcaccagttacgtttatgccactgtcaactgctgaatttttttctcgcggcggattttgcgttcttccattaccgccactatcgccatcaggcagatacaaccaatcgcggcgatatccagcgcggcgaaggtgcctgcccagccggtaaggccgaataccggcgtcccatcggcaatcattcccagacctaacttggcaaagctgtcaccaatcaggtaagcaaaggtgcctttaataccatcggcagcgccaatcgcttttttaggtacaaagccaacagcagccacaccaatcaacaattgcgggccaaagaccaggaaacccaacgcaaagagagaagccagatagatatattcgttactggcatgttgatacacaccgagcgtggcgataatcagcgccagcgcgatgcaggccaccaggccacggcgaccgttcgccaggtcagagagccagccccacagcagcgtaccgaccagcgcaccagcttcaaacagcgtaaagccctgaatcgccaccgctttagagagtttcagttcctggaacgcgtatacggttgaccactggtcgataccaatacgtaccacatagaggaaaatgttggcgaagcacagcagccagatcactttgtttttcagcacatactcaacaaagatctgccacttggtcatatcggtagattctgtctctttgtcctcttcgctgatctcctcgccgaacagttcttcagctttgccgaggccataagattccggggagtcgctgccgtaacgcaggccgataaaaccgacaatcagcgcgataatcgacgggaagataaacatgccgatgacatggccatcgaacaggtaatttgccacgaacagcgccacacctgctgcgcctgcaccgccaaggttgtgagaaatattccagaaaccgaggaatgtcccgcgtttacgacgcggcgtccatttggtgatggtggagtaactgcacgaaccgccggtactctggaaaaagccgcttaaggcgtagaaggcaatcatcaggaacaggctaaccgagccgctgcccatactggcactgaagcccagcatacaaatagcagagaggatcagcatgaacggcaggaattgtttggtgtttttgccgtcggcgtagtaggaaaccagcgttttacccacgccataagtgatggagaaacccaggccgatcatccccagctgcgtcatgctcaacccgtaggtcgaaatcatatcgttctgcgcgatgttaaagttcttgcgaatcaggtacatcgtcaggtagccgataaagaccaccaggtaggattgcatgaacggtttgaaccacattttgcgccgcacttcgagcggaaggtccagggtcggcttgcgaacctggtttaagaaagccagcatgggttactcctgaaatgaatacctgcgtgaggcatgcattgtaaaaatcagcagcaaatcaggcctgagatagcgtccaggcaaaacctggaaaatttcttagttttgccggatatgaagtgaaaaggtgagatgcatcacgcttcgcgcggtgtctgggcgttcaaaaagggcagtaacagcagtgcggaaatcccggcggcgatagagataaccacaaaaaatccgctccagtgccaggtatcgagtactttcgccagcggccaaccagcaagcgacgcccccagataagcaaacaagccgacaaaccccgtcgccgcccctgccgcctctttgtgggaacactctgccgccgccataccgattaacatctgtgggccaaagacaaaaaaaccaatggtgaagaagcaggttgcctgcatcacgtagctggcaaatggcatcagccacagggagccgactgaaagcaaaattccggcggcgaaaatcaaattcatcggccctcggttgccgttaaacaatttgtccgagccccaaccggctaccagcgcaccgataaatccgcccagttcaaacatcgtcactgccgtattcgccgtgaccagatcgacgcccagtgtctcggacatatacaaattgccccagtcgttgatcgccgcccggaccacatagaccagcacatagcaaaacgaaagcagccagatatacggattcagcaacacatatttggtgaggatctctttacgcgtcaaccctgccccttcttgttgttgagcaatttccagcgcgtcgtgtcgccattcaccgaccgccggtaaacctaacgcctgcgggcgatcgcgtagccgccagcagagaaaaatccccacgactatcgccatacaaccagcaatcatcatcccggcacgccagccgtaatgcagcgcagccgctgccatcacaatgggaatgagtgcgccgccgacgttatgcgccgtgttccataatgcccaccaaccgccgcgctcggtacgtgaataccaggccgttaacagacgcgcacacaccggtgaaccccagccctggaaaaaggcgttcagcacccagagcacggcaaacgcccatagcgacgtcgagaagccaaacagaatgttgataatgcccgtggcgataagccctatccccataaaataacgggcatttgagcgatcgctgacaatgccggagacaaacttcgacacgccataggtaatgtaaaacagggtcgctaacaggccgatatcgctacggctgagcacgccgttagcaaggatttctggtacggcggcgttaaaacttttccgcgtgaagtaaaacagcgcgtaacccagccagatggtcagcagaatatgccgacgccagtagcgatagcgggcatcaatttcatatttatcagtcattaatggcgcatcggcaggcgctttcagaaacggcaacatcatcaaaccttagacatagcgttgaggtagagaaacgctgacacgcgtgccgtgcagacaggaaatgtgtaatgtgccacccagcgccgttacgcgctcgcgcattccggtgaggccaaaaccttgttgcccggaacccggcggcaaaccgctgccatcgtcttcaataaccagcatcaaccgttcatcctgctgccagccttgcagggtgaccgcgctggcatcagcatgtttcacaatgttgttcagcccttcctggcagacacgaaacagcgtcacgcgctggttttcgcttaacgctgattcatcgattcgccattcgagatggctgacaataccgcgcccttccagctccatttcccgcatcagtgagcggatggcctgctccagggtgagatcatccaactggcgcggacgtaaccgacccaacaaacggcgcaccgcgtcgtaaacgcccagcgatagttgttcgatgagctgcccgctctgcttcacgctggcgttatctgccgccagccgctgaacaatgcccgcctgagtacgaatagcagtgatggtctgaccgatatcatcatgcagctcacgcgccacatcacggcgcacgctctcttcggtttccagcaaccgttcagccagatgctgattgcgcgccagttccttttgctgcgactggttaagttcacgcaaccgctggatgccagcgccaagcaacaaccctgtcagactttgcaccagcagcgagagcaataaatccaccggatgatcgcgccaggtttgactggcgatcagcgcgatggcgttcatcaacgtcgcaatcagcgccccttgccaaccatagtgccaggccagcgcgataatcggcagcgccagacagaatggcgtaaagcgcgacagttcgtccggcaatcccaactggagccagagactgataacaaacagcagcaagtaccagaccagatgtcgcccgcgccagttgattggctgagaaaccagtgacggaccgagcggcagccaggtgttattggcgagatagtgccagaacaccagacatatcggggccagcgtcaggccgccagttaaagtcagcaacagcgcattccacgactctttgccgtgccaaagccagggcagcgactgcaacaacgccgccgccgttaacgccgccccctgtaacagcaaggtgcgccagtcacgctgatggcgatagcgcgagatcagcgctacgggcagtaacgtcagtaaactaccgatcatcaataacggaaaatgggttaaaccgaccgcctgcgttagccagtaaatcagcagccactccgcgcccagcaatacgggccagtatccgcgcgggcattgcagcattagccccagacgcagaccaaacggaaataacagcaccgccatatcagggcgctcaaccagatgcaggctgatactccacaggcaaaaccatgcggcagagaagataaaaaagcaggcaataacggtaattaagcgggagaacaacgtcttcatcaccagccatcaaacatgcggcgcgccagctctacgtcgttactgacgcccagtttttccatcagattggcgcgatggacgtgtaccgttttcggtgacaagcccagttcggcggcaatctctttcaccgccattccttgcgccagtttttccgccacctggcgttcacgtttggttagcgggtcctgacgaccggatgccagtttaatggcaatatccggcgtcagataacagccgcccgtggcaaccgtatgcaccgcagcaatgagttcatccgggctacagcgtttggaaagaaagccgcgtgcccccgcgttaagcgcctgctcaaccagcgcaggactgtcgtgaacggagagcataatcgtcgccatacctttcggcagctggcttagcagctccagaccggagatatcgggcatggagatatcgcaaatacacacctgcacaccgcgccccggcagcgcctcgcgccccgaaccaaactcggcaactacctgcaaatcaggttccagccccagcagctgcgcaaagccggagcggacgatgaggtgatcgtctataagggcaacggtgatcatggtcttgtcctggcgggtaaaaaaaatacgcgcttaccttaacgataagcgcgatgttgttcaagccttgagcggttactgaaaaaacaccgcgatcttgttaaacatcgtcggatcggactgattacgctgcactttcacgacatcttccagcttatcgatttggcttatcatctgctccagacgctggtcgtcattgaccagtagccagatatggcttttgtcgctgtcctgaatcggcagacaaagaatgccttcaacgttaaaagcgcggcgggcaaaaaggccacaaacgtgggtcattacgcccggatggttgcgaacggtgagctccagaattacgttgtcatgagttgtgttttgcatggcttattcccccaccatttcagtattcgccgcacctggcggcaccatcgggtaaactttttcttcggcatcaatgcgcacatggatcagcgccgggccagggcgattgatgatttcctgcaatgaagcctgcggatcggcttcgttattcaaatcacaggtttcgaggccgaatccggcggcaatctgcataaagttgattttgcccggataggtggcggcaaaaacgccttgctcgtagaacagactctgttgctgatgcaccagccccagcgcttcgttgttcatcagaatgattttgacatccagctgattttcactggcggtcgccatctcctgaatattcatcatcaggctgccgtcgccggagaaacacaacactttgcgatccgggttcgccagcgcagcgccaatcgccgcaggcaggccaaaacccatcgtgcccagcccaccggaggtcagccactggcgtgggcgattgagcggataagcttgcgcggtccacatctgatgctgaccaacgtcggtggtgataattgcattgtcatcgacacaggcggcaacggcgttgatcaggccgtaatggcttaacggatcgcacgctttcgggattggacacggaaactcacgctgcaaatccgctaccaactggtgccactctgcacgcggttgcgcttccaccagcgggatcaactgcgccagcacgtcatcaacatccgcctgaatcgccacgtgcggctgcttgattttacccagctctgcacggtcgatatcgacatgaatgattttggcattcggacagaactgctcggttttgccaatcgcccggtcatcaaaacgcgcaccgagcactatcaacaaatccgcctcctgcaaaatatagttggtgctgcgcacgccgtgcatccccagcatacccagcgacaacggatgcgcttttggcaacatgcccagcgccattaaagtcatggtggtaggcagttgcgctttctccgccagttcacgcacccgtgcgggcgcattgatcacaccgccgcccagataaagcaccgggcgtttggcagcgttaatcatcgccgctgcgtcacgaatgctttcttcgctaaaggcgggggcggcggctttttctgccatagcgggctgtgtttcaatctcaaaaactgccgtttgcacatccttaggaatgtctatccacaccgggcctgggcggcctgattgcgcaatgcggaaggcatcgctcatgacctgcgggagttcttcgatatgtctgaccagatagttgtgtttggtgatggggatagagatgccgtaggtgtccacttcctggaaggcgtcggtgccgatcatcgaggcgggaacctgaccagtgatgcaaatcagcgggatggagtccagccgcgcatcggcaatggcggtcaccaggttagtcgcacccggtccgctacaggccatacagaccgccggtttaccgtcggtgcgcgccattccctgagcgataaagcccgcgccctgttcatgacgggccagaatatggcggatttgcgtgctttggcttaaggcatcgtaaacaggcaggatagaaccgcccggaatgcctgtcacaatcttaatgccctgctgttccaggaaatgaacgataaattctgcgccggtaaagcgcttacgcgtcgatgttgtgcccgaacttgccatgctccagtccttttcttctgggccgactttccgggaggtgcttaaacgaaaaaccccgcccggtttgcgccggcggggttttggaatcgtgtgttgttccagtccctacggcgcattgccgacgaccaccaccacacgcacgacgaccactgcggcggatggcgcagttggtagtagttttgcgttgagcatggaagtagtcattggggaccttgttggttttgtgtttaacaatatttatacaagcacagctttacaggggagacaatggaaaatttttcagcaagggaaaattgaggggttgatcacgttttgtactgaattgcagataacaaaaaaccccgccggagcgaggtttcgtcagtcgcctgcggctggtaaccgcaaagcacactgtattatgtcaacactgaaagtatacgtgttccgcgcagaacgcgcaatttcggcacgaattttgacgtatttagtgcatagttgagtatcgatcacagtttgcgttttgtccaaatattactgtttatttatacagtaaacttctataatatcactgtacgcaatgtgttatgcgggggccgcatcgttacccggcgcactaagtcctggctgaaacgggtggtgccgtcagcgccttaaccccgcgtgagcacactgtgttatgtcaacaagcacaacgtttctccttgagataccgcgtgcacaacagctggcaacaggcagcggaaaggtacgtcagctggcagtgctcctgaaccacaggagacgcgtatgaacctggtggatatcgccattcttatcctcaaactcattgttgcagcactgcaactgcttgatgctgttctgaaatacctgaagtaattcagattcaagtcgcaccaaaggggagcgggaaaccgctccccttttatatttagcgtgcgggttggtgtcggatgcgatgctgacgcatcttatccgccctaccatctctcccggcaacatttattgccgcttttgtttacatattctgccgctaaacaattccccattcctggcgtatatctggctaacattcatcaatgtgatagattcctctcccgcatttatgggaatgcgtagtgacttattctaattatttttataaaagcatccgtgataatgaaaaggcaaagaaacgtcaatttgttattgatgttggtattactcgtggccgtcggtcagatggcgcaaaccatttatattccagctattgccgatatggcgcgcgatctcaacgtccgtgaaggggcggtgcagagcgtaatgggcgcttatctgctgacttacggtgtctcacagctgttttatggcccgatttccgaccgcgtgggccgccgaccggtgatcctcgtcggaatgtccatttttatgctggcaacgctggtcgcggtcacgacctccagtttgacggtgttgattgccgccagcgcgatgcaggggatgggcaccggcgttggcggcgtaatggcgcgtactttaccgcgagatttatatgaacggacacagttgcgccatgctaacagcctgttaaacatggggattctcgtcagtccgttgctcgcaccgctaatcggcggtctgctggatacgatgtggaactggcgcgcctgttatctctttttgttggttctttgtgctggtgtgaccttcagtatggcccgctggatgccggaaacgcgtccggtcgatgcaccgcgcacgcgcctgcttaccagttataaaacgcttttcggtaacagcggttttaactgttatttgctgatgctgattggcggtctggccgggattgccgcctttgaagcctgctccggcgtgctgatgggcgcggtgttagggctgagcagtatgacggtcagtattttgtttattctgccgattccggcagcgttttttggcgcatggtttgccggacgtcccaataaacgcttctccacgttaatgtggcagtcggttatctgctgcctgctggctggcttgctgatgtggatccccgactggtttggcgtgatgaatgtctggacgctgctcgttcccgccgcgctgttctttttcggtgccgggatgctgtttccgctggcgaccagcggcgcgatggagccgttccccttcctggcgggcacggctggcgcgctggtcggcggtctgcaaaacattggttccggcgtgctggcgtcgctctctgcgatgttgccgcaaaccggtcagggcagcctggggttgttgatgaccttaatgggattgttgatcgtgctgtgctggctgccgctggcgacgcggatgtcgcatcaggggcagcccgtttaagcgcacgtcaccgcagcatcgtcatcagctccatgggagaacgatgctgctttatcagatcacgcatcacccgcatatgcggtgcggagtaagaataaaacgcctgatagcccgcacaaagcacgctgtctggcgtctcctgccgagcgtgcgggcacaggcgatgccagtcgcacgcctggcagtcacagcgcggttgcgggttttcgctgccacaccatttttgtaaggtggcgtcaaaaagctcaatcgagatacgactgatatctgcccgcacccaacactcgaacagggcaattaaaaatttcccccacagctctgctgtcaccgaagcggccgtcagatcgccccggtcatcaaattcaagatagggaatgagctgtacggagcggatgccccgctgtttgaaattgtgataaaaatcggcaggttgcagagcatccttgtactctacaaccagtttatgcctgtcctcttcagcatcaatgacctgacttcctgtcatgcgactctctcaataaatacgataagttgatgtatatgcgttacagcaaacagtattgcgagagataacaccgcgagggagatcaaaaatttgtcacggactacgtgaaattgggaaaaatcgctattcgtgacatccattaaattgcgattacgggtgtagtgccagaggatcagcgccacgatggcgagaatgccaatcgaaatccagaataacatgcccgcctggtgccagttgtgtttgatagccaacgccatcaacgcgccgtagcccagcatggtacgaaaccacgccagtgatgtgcgctccggctgcagtcctgggtcggcaatgcgtctggctttgcggctatccggcatacaacaccagtcccataacgatcaccgccacgaccatcaatattaagctaatgattaataagctgttggtgtagggcaggtcctctttcagacgcatcgctttttcattgcgtaaccagcgcaagtagccatacatcgctaacccgccggaaaacagacacaacaacaacgccagcagttcgcgaatgacgggcgtggcgaaatctggcgcaagttgatcaagcccaacccccgccgccagaaatcctagtgcagtacggatccacgccagaaaagtacgctcattagccagcgagaagcggtaatcaggcgcttctccgaggcgggaaattttcattgttgctcctttgcaatttcactaacgctctacctttagcggtttttttaagaatttcgtccgcccgtttcctgatatgcttttgccatccgctacaaggaggtcagatgggtatcatagctcaaaataaaatcagttcattgggcatgctgttcggtgccatcgctttaatgatggggattatccacttttcattcggccctttctccgcaccaccgccaacgtttgaaagcatcgtggcggacaaaacggctgaaattaaaagaggtcttctcgccggaataaaaggcgaaaaaattaccaccgtggagaaaaaagaggacgtagatgtcgataaaatcctcaatcaaagcggtatcgcactggccattgctgcgctactttgcgcatttattggcggtatgcgtaaggaaaatcgctggggcattcgcggcgcgctggtttttggcggcgggacgctggctttccataccttgctttttggtatcggcatcgtgtgcagcattttgctgatattccttatcttttccttcctgaccggcggttcactggtttaagcagcctgaataatgcccgccgggtgatcatcagcgggcattatcgtcagaacttctgttttttctcctccaccttcaccccttgtgtcggtaggccggtgtcatagtcgcgtacaactggcgaatagccatcttgtggacgtggacgaaacgcccccatccagcgcggccgtgcatctttacgccacggacgcagactccattggtaactgcggaacggatcgcgaattttgtccatgtaatccaataaggcgtcatgcattttgctgcgaacgtctgcaaaacggatatcatcgatcaggttatgcatttcatttgggtcattacggcgatcgtaaagttcatcactggtgaagaggttgagtaccagtttaaagtcatccgtcacccagcaacgcaccggaataaaaccgccaaagctgtcatgctcaatctcgtagcggttaaattccaccatcacgccgcgtggctctttcacggcaaggatattttcccccggcagaatctctggtttttcaatatctgccagcgccatcattgtcggcagtaaatcgatatgactgactggcgtatcgacctgtcgccgctccccttgcggcgaacggatgatcagcggaatgcgggtgatgtcgtcatacatcgccgcccctttactgatcagcttatgtgcgcccatcatttcgccgtgatcggaggtataaataacccacgtattttcacgttgctctggcgttaaggcattgatgacccgtccgatttggtcatcaacaaagtcattacaggcaaaatagagcggatggtgataaagcccgtcatcaccgactggcgatggcatcgcctgcgcccataagcggtgatgttccggtttgttagccaggtcatcctgtgctttctcgcccagctcgtagtaaaaatcagcgtatttctctaaatactccaccggacaggtgaacgggtgatgcggctcatcatacgaaaccaccatcaggaaaggctcgtctgcgcgcgcaggctgttgcagaaaatccaccgcccgattgctgatacgatgcgcccaggtgaaggtttcgtcgatatggttcgcctgtaaatcttcgacgctgtttaggccattgcgccacaggctaatctctttttccgtcagttcgctaagatagttcgccccatcgaaccagtaatcagcgtcccactccggcggacactcgccagtgccgaaatagtcatgaccgtcgagatgccatttgccgatgtaacaggtgtgatagccggcatccttaaagtagcgccccatagtggagatgtttttgcctggcgcgacgttgttggtccacgggccggactggttagcgtagataccggtaaatagtccggcccgtgcaggcgtacaaaccggtgaacaggtgtaggcggaattaaagcgaataccttccgccgccagactatcaatattttgcgtattcagcggtttaccgctatagcaaccgaccatattggtggcctgggtatcggtcatgacgaacagaaaattggggcgtttcataggctatccttcccgtcgggagtaaaggttacggctgggtcgtgacgatgccgccagctgtcaaaaatcaggtagacaatcactacggcggcaatgaaataactgatcatcgctaaccagcgcgtaccgtagccgccgaattcagccagcccggcatagacgccaatcatcgcgaacaggatgccaattgacgcgatcttgacgtttttccacggtttcatgtccaccgcaaacgcatctttgaaggtgaacggcgtggcgcgcggtttgataaaaccgatcaccagcatcacgaccacgttgatgcagaacgtacaggccagcacatagaggaaatggaagtcgaacttcaccagatagttgatggtgatgtagctgattatgccaatccccatcgctacttttgccgccagcgccgggatgcgcgggaagaaaaagcccataatgatgatggtaaccagcggcacgttgtaaatgccgttgagctgtttcatccagctatacagcccctgcggcgcgttggcgatccacggcgcgaccagcaccgaaacgatagcgataaagaaaccaaatttgcgcccgacggtgaccagctgctgcggctcggcattctggttaatgatgcgacggtaaatacccatactgaataacgtactggcgctattcagaaagccgttgaaggtactgatcaccgcaccaaataacaccgcgccgaagaaacccaccattggcactggcagaacgttattgaccagcgtcgggtaggccatgtcggctttcggtaaatcctgatacagatgaaacgcaatcaaccctggcagcaccagtaccagcgggtcgagcattttcagcaccgccgttaacagcgcccccttttgcccttccgccaggctttttgacgccagcgtgcgttgcacgatgccctgatttgtacaccagtaaaaggtgttcaccagaatcaaaccggtaaatgccgcgccaatcggcaagggatcggtcgggccaccgattgagtttaatttctcggcgtcgagtaggcagcctggcggctgcggcttgtcatggtctggaattaccgttataaaaaaagataatgtcattgtctttcaggtagttatatggcccgttcagctaaaccccgtaaacgcaaacccgcaccacaaagaagcaaacttccccgctatgttgtgaaacttcatccggatgatttttttgacgaagaagacgctgaagttctgcgctttgataattttgacgatgccgttgagtgctgcgctgacctgggtattccgttctttctggatgcaggaaacaaaaagctggtcttctggtttgttcgtgtcgatgacgaagggtatccggaaatagcccgctgtacggagcgggagtttgcaaccattcttgccggtatcagcgccggcggcatgtactgcccggagtgtggcacggttcactggccggacggagtccccccgcccttctgatgcttccccgttttgccgacatttttcagcagggaaaccgctggcttaactggctggagaaacaaccggaaggttcagtgcgtccggtagtcattgagtctgtgacaaaaatcatggcctgcgggaccacgctgatggggtacacacagtggtgctgttcatctccggactgcagccacataaaaaagatctgcttccggtgtaaaagtcgctcctgcccgcactgcggagtgaaggctggcgcacagtggatacagtatctgctgagtctggttcccgactgtccgtggcagcatattgtgttcacacttccctgccagtactggtccctggtgttccacaaccggtggttactggcagagatgagccgcattgctgcggatgtgatacaggaaatctgccgccaggcagatgtggtgccggggatattcacggtcatccacacatggggacgtgaccagcagtggcatccgcacattcacctgtcgacaacgaccggcggcgtgacatcagaccacacctggaaaaaccttcatttttacgcccgtaaggtgatgagtatgtggcgttaccggataacgcggttactgtcacggaaatatccggacctggtgataccggatgcgctggcagcagaaggaagcagtaaacgggactggaatcgcttcctggacagtcattaccggcggggctggaatgtcaacgtatcccgggtgatggataacgccacacatgtggcggtgtacttcggctcttacctgaaaaaaccgccggtgccgatgagccgtctggagcactatgctggtcaggatgaaattggtctgcgttacaacagtcaccggacaaaacgggaagaatacctggtgatgagtggtgatgagtttatggaaaggttctcctggcatgtggcggataaggggttccgtatggtgaggtactacggtttcctgagtccggtgaagcgccgcttactggaagaagttgtgtacgtcataacggagacggtgagaaaaacggcgatgcaaatcaggtggagagggatgtatcagaggttactgaaggttgacccgctgaagtgcattctgtgcggaagtcagatgcgttttacggggctgaagcggggttaccgactggcagagctggtcctgatgcatgagcgactggcacgacagcaggtgtgcggctgagagccgcagaggggaagttgcgtccattttaccggaaacggagcaaaaaaccgccattcataccctgtatcaatcagtgtcatcctgtttaatagtcgtttccgctcatatggtgcacaaggggtgttgaagaaacatccgttttgtggtgcttttttagtcttttggggatttaaattcctatcgatcaagccttatcagcggacttttttttgcagtttatggtctattgcatagactgagggggcagcacgaaacgttaaagtgcgatagccgccacagtgcgacgtaatgatgatgttattttcagcaagggatcgctataactcatcaggccaacacccacgatcaacagatgaatttattatgataagaaatgtgttgttagcgttcatgatatgcagcggaatgacattactcggaggatgctccagcgtgatgtcccataccggagggaaagaaggaacgtatcccggcacccgcgccagcgcaaccatgattggcgacgatgaaaccaactggggcactaagtcgctggcgattctcgatatgccgtttaccgctgtgatggacacgcttttactgccgtgggatgtgttccgcaaagacagctcggtgcgctcgcgcgttgaaaaaagcgaagccaacgcgcaagccaccaatgcggttattccaccggccagaatgcctgataactgatttagcgatcagtttcggtgatccacagctggccgccttccatccacgccagccactgaccatccggcgagaagaccacggcgtccgcagaaggtgaattggcgtggtgttcggttaaatactcaacctcgccgctttgcgcatgggcacaagcaattcgattatccagcacaaagcccaaccattctcctgacggatgccagttaaatgcagactgaatatccgttttgttatgggttaactggcgcggctcgccgccctgtggcgagataagccacagttgcacaatgccgttatcatctcgcattaaaaacgcgatttgtgtaccctgcggattacagcgcacccagtggcgcgggacgttgactaaccccggataagcccgatggtgggtaaaggttaaacgtcgctgcacgacgccacgcggtggcgcgggcagggttgtttccgttccgcttaacggcgcatcacctgccgctttccagccagcttcatcttgcggtaactcaacgataaacagctccggcactttctcgccctttggcgaaagtgtgtcgccaataaatgccagcgcgtgatttcctacccatccttcttcataagcacgattgatttcatcactgccaggctgtggcgtgggcgtggttttgctcaccagcacgcaccagtggctaccgctgtattcacgcggatgctgcttttgtacgttgaccgggccaaacggcgcagcaacaccgacgtttcgcaaatccagcgccggatcgagttcatgcattacatggtcgttataggtaaagctcaccctttcaccgttcgggctaaagacatgcacatggctgccgccgcgcagcactcctggcgtatacggcgcggtaatatccatcgcatcaaggttactcatcttgccgccttcaacaatcactccgcgccgatgatggaagtcgtaatgccatgtttcatcaggattttccgggccgtggatgaaaacatatttctctgacttcggatgaacggtcaccacgccgacgtgtgcgccctgtgacgcgcgatagataacctcgacctcgccggtatggatattcacacgctcaatggtctcgccggtaaacgacgcgccagaaggacgcacgtcaaataccagccactggctgtcgggcgtccaggtattggtattggtgagcaggtgattacggggagcaaaggttatctgtttcatggcgcggtcctgatacaaaacgggtcccgccatcatacttcacaaggacttcactttcagacaatagtcttttgccatcgtgatgaatgtgagtgaaaagatggaacatttcgacgtggcgattattggcctcggcccggcaggatcggcgttggcacgaaagttagcaggcaaaatgcaggtgatcgcgctggataaaaagcaccagtgtggtactgaaggtttcagcaaaccctgcggcggtctgctggcaccggacgcgcagcgatcttttattcgcgatgggctgacgcttcctgtcgatgtgatcgctaatccgcagattttcagcgtcaaaaccgtcgacgtcgccgcatcgctcacgcgtaactaccagcgaagctatatcaatattaatcgccatgctttcgacttgtggatgaaatcgctgatccccgccagcgttgaggtttatcacgacagcctgtgccgaaaaatctggcgtgaggatgataaatggcatgtcatttttcgtgcagacggctgggagcaacatattaccgcccgctatctggtcggtgccgatggcgcaaactcgatggtgcggcgacatctctacccggatcatcaaatccgtaaatatgtcgctatccagcagtggttcgcggagaaacatccggtgccgttctactcctgcatctttgataattcgataactaactgttattcatggagtatcagcaaagacggttattttatctttggcggtgcctatccaatgaaagacggtcagacgcgtttcacgacgctgaaagagaaaatgagcgcctttcagttccagtttggtaagacggtgaaaagcgaaaaatgcacggtgctgtttccctcgcgctggcaggattttgtctgcggtaaggacaacgcctttctgattggtgaagcggcgggatttatcagcgccagctcgctggaggggattagctatgcgctggatagcacagacattctgcgttcggtgttactgaagcagccagagaagctcaataccgcttactggcgcgccacccgcaaactgcgtttaaaactcttcggcaagatagtaaaaagccgatgcctgaccgcaccggctttaagaaagtggattatgcgcagtggtgtggcacatattccacagttgaaggattagccaacgcgcttcacatcgcccaccagcaggatataagagagcgcgccaatcaacgcgacggcggagatataaaccagtgcaggtgcgaaaccgtaaccctgcgccaggtaccccaccaccagcggaacggtgatgccgcccagaccaccggcgaagttaaacacgccgccggttaaaccaatcaggcgcatcggtgccagagaagaaaccagcgaccaggtaatcgaagcaaaaccgttaccgaagaatgccagcgccatcaggcacataatcatcatcggatcgttagtgtagttagcgcccataatgcaggtggagatcagcaagccgcagataatcggcgttttacgcgcaaagcccagtgaaaagcccttacgtaccagcagatccgctacccagccagagagcaggacgccgacaaacgccgcgaggaatggcaccgtggtcataaagcctgctttcagcgccgtgattcctttttcctgggttaaatagttcgggaaccaggttaagaaaaaccacagtgtagaagccaccgcaaattgcccaagataaacgccgatcagtttacgatggaacaccagtttccagtctttggctgttaacggctgacgcgcctctttcttcaccggcgcatcaccatccaccagaccgccgccatcacgaatgtaatccagttcagctttgctgatacctttggtcaggcgcggcggctgataaaccttaaaccaaatcagcgaccagataatgccgataccaccagtgacaatgaacacccagtgccagctcaacatctcctgaatccagatcagcagcggcgtcagaaacgccagaccgacaaactgaccagacgtataaaaaccaacggcagaagcgcgttcatgttccgggaaccagctggtcaccatccggttattggtcgggaaagcaggcgcttcgaaaataccggttatcgcgcgcagaccaattaatgacattaagcccgtggcaaagccctggaataaagtcgccactgaccagccaaatatcgcaataaaataagtcacgcgagaacctacgcgatctaaaaaccaaccgccggggatctgacatagcgtataaagccaggcgaaggccgaaaatacatagcccatttccgctttggtaatgccgaactcttcctgaatatgggcggaagccacggccaggttggcgcggtcgacataacaaatgactaccgtaataaagatcatcaccagcgtcagataacgccgacgccccggctttgctgcattaacgggaatatccatagcgagctttctccagattttgggcatagcgaagccgctcaccatgccctgtaatttacagagggttatatttttgtattgctgttttagtgcccgatgaggggcttacgtggcaggaattaccactctgctacgctgttatcttcatgacgccagagcggattacgccagtccggggcatttttactgaactcaatcactttagcttcgtcgatttccacgcctaagcccggtttcgttaacggtttaaagaagccgccgaccatgctgaagtcttctttgtttttcacaaagtcgagtaactccgcgcctttgttgtaatgaattcccatactttgttcctgaagtacggcgttataggaaacaaagtcgatatgcaggcaagccgccagtgcaatcggtccgagcggacagtgcggcgcaagggtcacgtcataggcttctgccattccggcgattttgtagcattcggtaataccgcccgcgtgggagagatccggttgcagaatcgaaataccacctgcctccagcacgcgtttaaaatcgaagcgtgagaacatgcgttcacccgccgccagtggaatatgcgtttgtgccgccagtttcgggtagtattcggcttgttccgccagcaccggctcctcaataaacagcgggcgatacggctccagttctttaatcagcactttcgccatcggcgcgctgacgcgaccgtggaaatcaagaccaaactcaatctgattgccaaaagcttcacgaatttgtgccacggtgttaaccgccgcatctaccgcgcgggagttatcaattagccccagttcttcacaaccgttcagtttgaaggtatcgaagccgatttcgcgtagcgttttaatgccgtcgataacatccgccggacgatcgccgccaacccaactgtaggctttaattttgtcgcgaaccaggccgcccatcagttgccagaccggcgcattcagcactttacctttgatatcccataacgcctggtcaatcccggcgatggcgctcatcaggatcggaccgccgcgatagaatccggcgcgatacatcacttgccataagtcattgatgcgcgatggatcctgaccaatcaaatagtcacccagctcgtgaactgccgcttccaccgtacgggcgcggccttcgatcacgggctcgccccaaccgaccacgccttcatcggtttcaattttcaggaacatccagcggggaggtaaacgatacgtggtaattttggtgattttcattgcactgcctctcgatacgccttaacaaatgctgctgcctgctgcgcggtgcgctctacggattgcccggcgcgatagagatcgctgcctaagcccgcccctgcacaacctgcgtctatccactgcgccaggttttctggcgtcacgccgccaacggcaaagactgcgatgtccgatggcaataccgcttttaacgctttgatgtattgcggaccaaaagccgatgacggaaatattttcagcgcctgcgcgcccgcttcgagcgcggtaaaggcttcggtcgccgtcgcgcagccggggcagacggtcatgccgtagcccaccgcacggcggatcacttcactatggatattgggcgtaacgatgagctgacagctcatcctggcgagcgcatcgacctgttcaggtttcagtaccgtacctgcgccaatcaacgccttgtcgccgtacgcatcaacgatggcgggaatgctttgctcccattgtggggaattcagcgggatttcaaccgcgtcgaacccggcgtcaatcaccgcgccaacatgcgccagcgcctcgtcgggcgtaataccgcgcaaaatggcgatcagcgggagtttagtttgccactgcatgagcgatgctccttataccagcctgaaatgccgtgtcgcccgccaccgccgtcacgtcgcaacccatcgcctgaaaggcttgctggtagcgcgcggtcagcgatgttccggcgacaagggtgatggcgtgttgatgggccacatagtcgcgcatactggcgacctctgcgccaatcaacaaaccagagagaaattcgctgacctgttcgcggggaagtgttcccagcacatgcgaggcgcgaacttcaaaaagctgcggcaatatggcgggcgtattaagaccacgctcaaggccagctatgaaggcatcggcagagttttcctgcggcggcaaacctgcgccaatcaatgagtgatttaacagtaaatgatgtaattcaccggtcatcacggtgcgaaaatcgttgatttgctggctatcggcctgcacccatttgcaatgggttccgggcatgacataaagagaggaaggagccagagctcgcgcgccgatcaattgtgtttcttcgccgcgcatcacattgtggttatcgtcatgagagacacataatccgggaataatccagatattgtcgccaactgacgttaattgttcgccaatagacgaaaaacaggcaggaacagataaatacggtgcaactttccagccgacgttgctgccaaccattcctgccattaccactggcgttttctcttcacgccagtcggtcgtgacttctgctaacaccgcagccggagattttccgttcaggcgcgtgacgcctgcttctgattgcctgctctccaggcagtggtcgccctgataaagccaggcgcgcagattggtcgatccccagtcaattgcgatgtagcgagctgtcatgtgatttcctttaaccttcgtgtcgagctggcgatcatggtaagcgccgcctgctctgccgcatcgccgtcctgatgtcgtatcgcatcgaacagcgccttatgttcctggagcgtttgcggcatgttggcctcatcgcccatccaggttcgttcaaaaaccgcccgctgcagcgaactgatcgcaatgctaagttgctgtaacaccgggttatgcaccgactgcagcaccgcctcgtggtagcgaatatccgcttcgttaaacgcttcgcggtcctgattgttggcaatcatctcgttcagcgccgattcaatctgcgccagatcgctggaagtcgcgcgctctgctgcccaacgggcaatcgccggttccaccagatttcgcacttcgctcatggcactgataagccgtgggtcgtagtcattttccagcacccattgcagtacgtcagtgtcgaggtaattccactggttacgcggtgccacaaacgccccgcgataacgtttcatttcaatcagccgcttcgccatcagcgaacggaacacctcacggatgatgttgcgcgaggttgcaaactcctcacagagttccgcctcagccggaagcggcgagcctggcacgtatttgccgtgaacgatctgtttacccagcgtaatgacaatgcgatcggttttattgagagtcatggagagtccttgtgctctgtatgttcttctctactttaccccgatcgatgcataacgcggcaactttgtagtaccagcgtgatgacgttcgcgtttgccgtgcgtgtaatgtagtacaaacttatattgttgtactacaatttagatcacaaaaagaacaatgcataaaaaaatgacatgcgtcgggcagaaatctgaaaagggatatcaggcgctaaacaggagggaaagaagagtatgctttcaacggcttagctactcgtttaaaggattaatcatgaagttgaattttaagggattttttaaggctgccggtttattcccactggcgctgatgctttcaggctgtatctcgtatgctctggtttcccataccgcaaagggtagttcaggaaagtatcaatcgcagtcagacaccatcactgggctatcgcaggcaaaagatagtaatggaacaaaaggctatgtttttgtaggggaatcgctggattaccttatcactgatggtgccgatgacatcgttaagatgctcaatgatccagcacttaaccggcacaatattcaggttgccgatgacgcaagatttgttttaaatgcggggaaaaagaaatttaccggcacaatatcgctttactactactggaataacgaagaagaaaaggcactggcaacgcattatggttttgcctgtggtgttcaacactgtaccaggtcactggaaaacctaaaaggcacaatccatgagaaaaataaaaacatggattactcaaaggtgatggcgttctaccatccatttaaagtgcgattttatgaatactattcacccagaggcattccggatggtgtttccgcagcattactgccagtgactgttacgctggacatcattactgcaccgctgcaatttctggttgtatatgcagtaaaccaataatcagtaagcgggcaaacgcgtttatgctgtttgcccgcccacagattaattcagcacatacttctcaatagcaaacgccacgccatcttcaaggttagatttggtgacaaagttcgccacttctttcactgaaggaatagcgttatccatcgccacaccgacgcctgcatattcaatcattgcgatatcgttttcctgatcgccaatcgccatgatttcttccggtttaatacctaacacgtcggccagtgatttcacccccgtacctttgttaacgcgtttatcgaggatttcgaggaagtacggcgcacttttcagcacggtatatttctctttcacttcctgcggaatacgcgcgatagcctggtcgaggatggcgggttcatcaatcatcatcactttcaggaactgggtattggggtccattttctccgcttcgcagaacaccagcggaatggtggcaacgaaggattcatgcaccgtgtagtagctgatatcacggttggcggtgtacagcgtggtgcggtccagggcgtggaaatgagaaccgacttcgcgagagagtttttccaggaaacgatagtcgtcatagctgagagcagtttgcgccacggtgctaccatcagcggccttctgtaccagcgcgccgttataagtaatgcagtagtcgcccggctgttccatatgcagctctttcaggtagttgtgcacacctgcatacgggcgacccgtcgttagcacgacattcacgccacgggcgcgagctgcggcaatcgcatttttaacggcgggtgaaatggtgtgatcgggcagcagaagggtgccatccatatcgatagcaatgagtttaatagccatgagttccccaggtagattggttcctgacccatgctaacgcgattccgctcaaaaatcagtacaacacccgagggaaaagggggatgcaacgcgcgttgcgtgctccctttttgcttagcggaagagtttccctttcagcagttccatgcctgcggaaagcagatcgttattggcttgtggtgacacttcaccttgcggtgagagcgcatcaataatcttcggcaattgttctgccagtaaaatggaagctgtactggtatccacgccaagtttttgcccgagatcggacaccgcatttgtgccgagcgccgattccagttgctcgccactaaccgattgattgccctgttgattactcagccaggttgagagaatggcccctaagccgccactttgcagtttttccagcagcacctgaatgccgccctgctcctcaacccaacttaaaatagcctgatatttccccgcatcgcctttcagaaaggcaccgacaacttcatcaaaaagccccatgataatcacctgtaaagcgttacgtgttgacccaaaaagtatagatttgcgggatgataattgcggattgcagaaataaaaagggcggagatgatctccgcccttttcttatagcttcttgccggatgcggcgtgaacgccttatccggcctacaaaatcatgaaaattcaatacattgcaagattttcgtaggcctgataagcgtagcgcatcaggcacgctcgcatggttagcgccattaaatatcgatattcgccgctttcagggcgttctcttcaataaacgcacggcgcggttcaacggcgtcgcccatcagcgtggtgaacaactggtcggcagcaatcgcatctttaacggtaacgcgcagcatacgacgactttccgggtccatagtggtttcccacagctgttccgggttcatctcgcccagacctttataacgctggatggagaggccgcgacgggactctttcaccagccagtccagcgcctgctcgaagctggctaccggctgacgacgctcgccacgttcgataaacgcatcttcttccagcaagccacgcagtttctcacccagcgtgcagatacgacgatattcgccaccggtgataaactcgtgatccagcggatagtcagtatccacaccgtgggtacgcacgcgaacaatcggctcgaacaggttttgctcagcattggtgtgaacatcaaacttccactggctgccgtgctgttctttgtcgttcagttcgctgaccagcgcgttcacccagcgggtaacggtctgctcatcagaaaggtcagcttccgtcaacgtcggctgatagataagctctttcagcattgctttcggataacgacgctccatacgattgatcattttctgcgtcgcgttgtactcagataccagtttctctaacgcttcgccagccaatgccggtgcactggcgttggtgtgcagcgttgcgccgtccagcgcgatagagatctggtactgatccatcgcttcgtcgtctttaatgtactgttcctgcttgcctttcttcactttgtacagcggcggctgagcgatgtagacgtgaccgcgttcaacgatttccggcatctgacgatagaagaaggtcaacagcagcgtacgaatgtgcgagccgtcgacgtccgcatcggtcatgatgatgatgctgtgataacgcagtttgtccgggttgtactcgtcacgaccgataccacagccaagcgcggtgataagcgtcgccacttcctgagaagagagcatcttatcgaagcgcgctttctcgacgttgaggattttacccttcagcggcagaatcgcctggttcttgcggttacgcccctgcttcgcagagccgcccgcggagtccccttccaccaggtacagttcggaaagcgccggatcgcgttcctggcagtctgccagtttgcccggcaggcccgctaagtcgagcgcacctttacggcgggtcatttcacgcgcgcgacgcgccgcttcacgggcacgggcagcatcgataattttgccaaccacgattttcgcgtcggttgggttttccagcaggtattctgccagcagttcgttcatctgctgttcaaccgccgatttcacctcagaagaaaccagtttgtctttggtctgggaggagaatttcgggtccggcactttcacggaaacgaccgcaatcaggccttcacgcgcatcgtcaccggtggcgctgactttggcttttttgctgtagccttctttgtccatgtaggcgttcagggtacgggtcatcgccgcacggaagcctgccaggtgagtaccgccgtcacgctgcggaatgttgttggtaaagcagtagatgttttcctggaagccatcgttccactgcaacgccacttcgacgccaataccgtctttttcagtggagaagtagaagatattcgggtggatcggcgttttgttcttgttcagatattcaacgaacgccttgatgccgccttcatagtggaagtggtcttctttgccgtcgcgcttgtcgcgcagacgaatggaaacgccggagttgaggaacgacaactcacgcagacgtttcgccagaatttcatattcgaactcggtcacattggtgaaggtttcgaggctgggccagaaacgcaccatggtgccggttttttcagtctcgccggtaaccgccagcggggcctgcggtacaccgtgttcgtagatctgacggtgaattttaccctcgcgctggataaccagctccagtttttgcgacagggcgtttactaccgaaacaccaacgccgtgcagaccgccggacactttataggagttatcgtcaaatttaccgcctgcgtgcagaacggtcatgatcacttccgccgccgatacgccctcttccgggtgaataccggtcggaatgccgcgcccgtcatcctgtacagagacagagttatcggcgtgaatggtgacgataatttctttacagtgacccgcgagcgcttcgtcgatagcgttatctaccacctcgaataccatgtggtgcagaccggtgccgtcatccgtgtcgccgatatacatacccgggcgcttacgcaccgcatccagccctttcaggactttgatactggaggagtcataagaattcgacatcaacgtttctcgctcatttatacttgggttaatccgttattttacccttttccacggtaaacatcttcgaattttcgtccgacatgtctataacgtgttcagcactgatcgcgctgacaaagacctgtgattgcgtcgcttttaagcggctggcaagcagcccgcgacgctcatcatcaagctcagaggcaaaatcatctatcaggtagagacaccgccgcccgctttcacgggtgaggaactctccttgcgccagacgtaaggcgcacatcaacagcttaagctgcccacgcgataaggtatcttccaccggcgcaccgtcggcgcgaatgcgtaagtccgctttgtgcgggccgtgcgcggtgtaggttagctggcgatcgcgttcaaaattacgttccagcacctcagcatattctgtctctttctcccagccgcgctggaaagagaaagtcagagaaaactcagggagaaattgcttacaggtatcagccatatcggccgcgataccggcgctatactccgcgcgccaggtgctgatttgctccgccagcgggatcagctctttatcccacgggcgtagctgttcgtaacgtgtcacctggcgcagcgccgcattgcgctgcttgagcaatcgcttgagattgctccaggcggtgaaaaatccgggttcgttgtgaaagcatccccagtcgaggaatgctcttctgtatttggggccgccgttgagtaaagtaaacccttctggcgttatcaactgcattggcatcaggtgcgccagttccgcgaccttatgcccgtctgcaccgtcgatgcggactttgctgtcgccctgtttgtctttggttaagccaatcgctgtctcgcgctcttcgccctgtaatcgcccgtggagaacaaacgcctcctgctcatggcgaatgacgcgaccaatctgcaaactgcgaaacgcccgaccatggccgagcgtatagatggcttccagcacgctggttttgccactgccgttggcacctaccagaaagttaaagccgggagataaggcgagatccgcggtttcaatgttgcggaaatcgcggatcaacaagcgggtgagggacattacagtctcattggcatgacaacataagccgcgctctggctggccgcatcttcaatctgcacgctggaaaccgaatcggtcagcatcatgcggacgttttcgcatttcagcgcgttcagaacatccagcacataactgacgttgaagccgatttccatctccgcaccgctataggtaacgtcgaggatctcttccgcttcttcctgttccgggttgttggcggtgattttcagctggttttcgctgacataaagacgtacgccgcggaatttctcgttagagagaatcgccgcgcgagcaaacgcctgcttgagcagatcgcagccagcttccagatgtttgtccgggttcttcggcagaacgcggcgataatccgggaagcgaccatccaccagtttggaggtgaagataaagtcgccaacgtgggcgcgaatgttgttgctgccaatctgtacgcgcagcggattgtcgccgccgtcgagcatacgcatcagttcaatcacgcctttacgcggtacgatcaccgaatggcttggcaaagattgaccaattggcattgaacagaccgccagacggtggccgtcggttgccacggtgcgcagttcttcaccttcggtttcaaacagcataccatttaagtaatagcgaacgtcctgatgcgccatagaaaactgggtcgcttcaatcagacgcttcatcgttgcctgcggcagggtaaattcgacttcactctgccagtcatcgaggttcgggaaatccgccgctggcagggtagacagcgaaaaacggctacgcccggagcgtaccagcatccgttcaccttccagctgcacggcaatttccgcgccttcaggcagaccacggcagatatcaaagaatttgcgcgccggaacggtcgtcgctcctggctcgtgtggctgaaccagcgcaacacgtgccaccatttccatctcgagatcagtaccggtcagcgacaacgtaccgtcagcaacctgtaacagcagattaccgagaatcggtagcgtaggacgaccacctaacggaccgctcacctgttgtagcggttttaataaatgctcacgttctacggtaaatttcataggtttacgatgacaatgttctgattaaatttgaaaaatcttctttgatatcgtggctctcttcacgcaactgctcgatcttacggcaggcatgaagcaccgtcgtgtggtcacggccaccaaacgcatcgccaatctccggcagactgtggttagtcagctctttcgccagcgccatcgccatctggcgcggacgcgccaccgagcgggatcgacgcttggaaaggagatccgcgactttgatcttgtagtactccgccaccgtcttctgaatattgtcgatggtgaccagtttttcctgcaatgccagcaagtcgcgcagcgcctcacgcacgaagtcgatggtgatcgcccgtccggtaaagttggcattggcaatgacgcggttcagcgccccttccagctcacgtacgttagatcgtagacgcttggcgataaagaacgccacttcgcccggcaaacgaatgtcgttttcgtcggcctttttcatcaggatcgccacacgggtttccagctctggcggttcgatcgccacagtcagtccccaaccgaagcgggatttcaaacgatcctcaacgccgttgatctctttcggatagcgatccgaggtgagaatgatctgttgattaccttccagcagggcgttgaaggtgtggaaaaactcttcctgagatcgttctttattagcaaaaaactgaatatcgtcgatcagcagtgcatctacggaacggtagtagcgtttaaactcttcgatcgcgttgttttgcagggctttaaccatgtcctgaacaaagcgctcggagtgcatataaaccactttggcattcggcttgcgcgccataatgccgttacccaccgcatgcagcaggtgagttttacccagacccgtgccgccataaaggaacaacgggttataggcaccgccagggttatccgccacctggcgagccgccgcgcgcgccagttggttagatttaccttcaacgaagttatcaaacgtgtgtttgacgtttacgttagaacgataggtcggttctgccggggccgggacgttatcccaacctgagcgcgtagaaggcgcagcacgttgcggctgcgtttgcgccacctgtgcaggggccgcgacgttgctcgtcactgccgcttgtggcgtttgcgtcaccggtttggtgccgacttcaaaacgcagctgtggggcatccgctccgcagaaactggttagcagtccattgatattattaaggtacttgtcccgtacccaatcgaggacaaaacggtttggcgcgtacagggccagcgtgttatcgctcagttccgcctgcaatgggcgtatccacatactgaattctgtggctggtaactcatcctgcaatcgggcaagacactgctgccaaagcgaaagtgacacggcggactccactcgaacaaaagtcgataatgactaaggctgaaacattcatgattgttgacgtacgtcgaaaagaccctgcttgagggtgacgcacgaaccgctgtctgcggttatatgcccgatcaagatcctgcaaaacgatcgggaccgcggatcatagcctaaactgcgcaagagatcttctgtttctcacagattttcccgatttatccacaggactttccagaactcgctaagtgtaaacgatcctgccgcgaggcgggcacgatttacgccgcatattggaaaatttaatgaccatagacaaaaattggcttaatcgatctaataaagatccaggacgatccttgcgctttacccatcagcccgtataatcctccacccggcgcgccatgctggtttccactggtgtgaggtcgtacattttccctgcgaaaaggtgcggaaaagcgcggtaaataaggaaagagaattgactccggagtgtacaattattacaatccggcctctttaatcacccatggcttcggtgtccatcgtttcatttttcggcggatatccaataaagccattgaatttattcaagtttaggtagaaatcgccatgaaacgcacttttcaaccgtctgtactgaagcgcaaccgttctcacggcttccgtgctcgtatggctactaaaaatggtcgtcaggttctggcacgtcgtcgtgctaaaggccgcgctcgtctgaccgtttctaagtaataaagctaacccctgagtggttaagctcgcatttcccagggagttacgcttgttaactcccagtcaattcacattcgtcttccagcagccacaacgggctggcacgccgcaaattaccattctcggccgcctgaattcgctggggcatccccgtatcggtcttacagtcgccaagaaaaacgttcgacgcgcccatgaacgcaatcggattaaacgtctgacgcgtgaaagcttccgtctgcgccaacatgaactcccggctatggatttcgtggtggtggcgaaaaaaggggttgccgacctcgataaccgtgctctctcggaagcgttggaaaaattatggcgccgccactgtcgcctggctcgcgggtcctgatagccctcattcgggtctatcaacgcctgattagtccgctactcgggccgcattgtcgtttcactccaacctgttcaagctacggaattgaggcattgcgcaggtttggagtgataaaaggcagttggttgacggtgaaacgcgtattaaaatgccaccctttacaccctggtggtgacgatcccgtcccgcccggaccatttgataccagagaacactaacgatggattcgcaacgcaatcttttagtcatcgctttgctgttcgtgtctttcatgatctggcaagcctgggagcaggataaaaacccgcaacctcaggcccaacagaccacgcagacaacgaccaccgcagcgggtagcgccgccgaccagggcgtaccggccagtggccaggggaaactgatctcggttaagaccgacgtgcttgatctgatcatcaacacccgtggtggtgatgttgagcaagctctgctgcctgcttacccgaaagagctgaactctacccagccgttccagctgttggaaacttcaccgcagtttatttatcaggcacagagcggtctgaccggtcgtgatggcccggataacccggctaacggcccgcgtccgctgtataacgttgaaaaagacgcttatgtgctggctgaaggtcaaaacgaactgcaggtgccgatgacgtataccgacgcggcaggcaacacgtttaccaaaacgtttgtcctgaaacgtggtgattacgctgtcaacgtcaactacaacgtgcagaacgctggcgagaaaccgctggaaatctcctcgtttggtcagttgaagcaatccatcactctgccaccgcatctcgataccggaagcagcaacttcgcactgcacaccttccgtggcgcggcgtactccacgcctgacgagaagtatgagaaatacaagttcgataccattgccgataacgaaaacctgaacatctcttcgaaaggtggttgggtggcgatgctgcaacagtatttcgcgacggcgtggatcccgcataacgacggtaccaacaacttctataccgctaatctgggtaacggcatcgccgctatcggctataaatctcagccggtactggttcagcctggtcagactggcgcgatgaacagcaccctgtgggttggcccggaaatccaggacaaaatggcagctgttgctccgcacctggatctgaccgttgattacggttggttgtggttcatctctcagccgctgttcaaactgctgaaatggatccatagctttgtgggtaactggggcttctccattatcatcatcacctttatcgttcgtggcatcatgtacccgctgaccaaagcgcagtacacctccatggcgaagatgcgtatgttgcagccgaagattcaggcaatgcgtgagcgtctgggcgatgacaaacagcgtatcagccaggaaatgatggcgctgtacaaagctgagaaggttaacccgctgggcggctgcttcccgctgctgatccagatgccaatcttcctggcgttgtactacatgctgatgggttccgttgaactgcgtcaggcaccgtttgcactgtggatccacgacctgtcggcacaggacccgtactacatcctgccgatcctgatgggcgtaacgatgttcttcattcagaagatgtcgccgaccacagtgaccgacccgatgcagcagaagatcatgacctttatgccggtcatcttcaccgtgttcttcctgtggttcccgtcaggtctggtgctgtactatatcgtcagcaacctggtaaccattattcagcagcagctgatttaccgtggtctggaaaaacgtggcctgcatagccgcgagaagaaaaaatcctgattcggtgagttttcgctaaaataagggcggtcagttgaccgccttttttcttttcgtagggcggataagcaccgcgcatccgccacacaaagcaacaggaacatcatgagcgataatgacactatcgtagcccaggccacgcctccgggacgtggcggcgttggcatcctgcgcatctccggcttcaaagcccgtgaagttgccgaaaccgtgctgggtaaactgcctaagccgcgctacgccgattatcttccgtttaaagacgccgacggcagcgtgctcgatcaggggattgcgctatggttccctggcccgaactcgttcaccggcgaagatgtgctggaactgcaaggtcatggcggtccggtgatcctcgacctgctgttaaaacgcattctgaccattcccggcctgcggattgctcgccctggtgagttttccgaacgcgcgtttcttaacgataaacttgacttagcccaggccgaggcgattgccgatcttatcgacgccagttcggaacaggcggcccgttcggcacttaactcgctgcaaggcgcattctccgcacgggttaatcatctggtagaagccctcacccacttgcgcatttacgtcgaagcggcaattgatttccccgatgaagagatcgatttcctctccgacggaaaaattgaagcccagctcaatgacgttattgccgatcttgatgcagtgcgtgctgaagcacgtcagggtagtttgttgcgcgaagggatgaaagtggtgattgccggacgtcctaacgccggtaaatcgagcctgttaaacgcgctggcggggcgtgaagcggcaatcgtaaccgatatcgccggaactacgcgtgacgtgctgcgtgagcatatccacattgacggaatgccgctgcatatcatcgataccgccgggctacgtgaagccagtgacgaagtagaacgtattggtatcgagcgcgcgtggcaggaaattgaacaggccgaccgcgtgctgtttatggtcgatggcaccacaacagacgccgtggatccggcagagatctggccggaatttattgcccgtctgccagcgaaactgccgatcaccgtggtgcgcaataaagccgatatcaccggcgaaacgctgggaatgagtgaagtgaacggtcacgcgttaattcgtctctcggcaaggactggtgaaggcgtggacgtgctgcgtaaccatctcaaacagagcatgggctttgacaccaacatggaaggcggcttcctggcgcgtcgtcgccacctacaggcgctggaacaggcagcggaacatctacaacagggcaaagcgcaactgttgggagcctgggcaggtgaactgctggcggaagagttgcgtctggcacagcagaacttaagcgaaatcaccggggaatttacttcagacgacctgctggggcggattttctccagcttctgtattggtaagtaaccgcgcttacgaagccgcattctgactgtcagatgcggcttcgcttcattgttaccactcctgttattcctcaaccctttttttaaacattaaaattcttacgtaatttataatctttaaaaaaagcatttaatattgctccccgaacgattgtgattcgattcacatttaaacaatttcagaatagacaaaaactctgagtgtaataatgtagcctcgtgtcttgcgaggataagtgcattatgaatatcttacatatatgtgtgacctcaaaatggttcaatattgacaacaaaattgtcgatcaccgcccttgatttgcccttctgtagccatcaccagagccaaaccgattagattcaatgtgatctatttgtttgctatatcttaattttgccttttgcaaaggtcatctctcgtttatttacttgttttagtaaatgatggtgcttgcatatatatctggcgaattaatcggtatagcagatgtaatattcacagggatcactgtaattaaaataaatgaaggattatgtaatggaaaactttaaacatctccctgaaccgttccgcattcgtgttattgagccagtaaaacgtaccactcgcgcttatcgtgaagaggcaattattaaatccggtatgaacccgttcctgctggatagcgaagatgtgtttatcgatttactgaccgacagcggcaccggggcggtgacgcagagcatgcaggctgcgatgatgcgcggcgacgaagcctacagcggcagtcgtagctactatgcgttagccgagtcagtgaaaaatatctttggttatcaatacaccattccgactcaccagggccgtggcgcagagcaaatctatattccggtactgattaaaaaacgcgagcaggaaaaaggcctggatcgcagcaaaatggtggcgttctctaactatttctttgataccacgcagggccatagccagatcaacggctgtaccgtgcgtaacgtctatatcaaagaagccttcgatacgggcgtgcgttacgactttaaaggcaactttgaccttgagggattagaacgcggtattgaagaagttggtccgaataacgtgccgtatatcgttgcaaccatcaccagtaactctgcaggtggtcagccggtttcactggcaaacttaaaagcgatgtacagcatcgcgaagaaatacgatattccggtggtaatggactccgcgcgctttgctgaaaacgcctatttcatcaagcagcgtgaagcagaatacaaagactggaccatcgagcagatcacccgcgaaacctacaaatatgccgatatgctggcgatgtccgccaagaaagatgcgatggtgccgatgggcggcctgctgtgcatgaaagacgacagcttctttgatgtgtacaccgagtgcagaaccctttgcgtggtgcaggaaggcttcccgacatatggcggcctggaaggcggcgcgatggagcgtctggcggtaggtctgtatgacggcatgaatctcgactggctggcttatcgtatcgcgcaggtacagtatctggtcgatggtctggaagagattggcgttgtctgccagcaggcgggcggtcacgcggcattcgttgatgccggtaaactgttgccgcatatcccggcagaccagttcccggcacaggcgctggcctgcgagctgtataaagtcgccggtatccgtgcggtagaaattggctctttcctgttaggccgcgatccgaaaaccggtaaacaactgccatgcccggctgaactgctgcgtttaaccattccgcgcgcaacatatactcaaacacatatggacttcattattgaagcctttaaacatgtgaaagagaacgcggcgaatattaaaggattaacctttacgtacgaaccgaaagtattgcgtcacttcaccgcaaaacttaaagaagtttaattaatactacagagtggctataaggatgttagccactctcttaccctacatcctcaataacaaaaatagccttcctctaaaggtggcatcatgactgatcaagctgaaaaaaagcactctgcattttggggtgttatggttatagcaggtacagtaattggtggaggtatgtttgctttacctgttgatcttgccggtgcctggtttttctggggtgcctttatccttatcattgcctggttttcaatgcttcattccgggttattgttattagaagcaaatttaaattatcccgtcggctccagttttaacaccatcaccaaagatttaatcggtaacacctggaacattatcagcggtattaccgttgccttcgttctctatatcctcacttatgcctatatctctgctaatggtgcgatcattagtgaaacgatatcaatgaatttgggttatcacgctaatccacgtattgtcgggatctgcacagccattttcgttgccagcgtattgtggttaagttcgttagccgccagtcgtattacctcattgttcctcgggctgaagattatctcctttgtgatcgtgtttggttcttttttcttccaggtcgattactccattctgcgcgacgccaccagctccactgcgggaacgtcttacttcccgtatatctttatggctttgccggtgtgtctggcgtcatttggtttccacggcaatattcccagcctgattatttgctatggaaaacgcaaagataagttaatcaaaagcgtggtatttggttcgctgctggcgctggtgatttatctcttctggctctattgcaccatggggaatattccgcgagaaagctttaaggcgattatctcctcaggcggcaacgttgattcgctggtgaaatcgttcctcggcaccaaacagcacggcattatcgagttttgcctgctggtgttctctaacttagctgttgccagttcgttctttggtgtcacgctggggttgttcgattatctggcggacctgtttaagattgataactcccacggcgggcgtttcaaaaccgtgctgttaaccttcctgccacctgcgttgttgtatctgatcttcccgaacggctttatttacgggatcggcggtgccgggctgtgcgccaccatctgggcggtcattattcccgcagtgcttgcaatcaaagctcgcaagaagtttcccaatcagatgttcacggtctggggcggcaatcttattccggcgattgtcattctctttggtataaccgtgattttgtgctggttcggcaacgtctttaacgtgttacctaaatttggctaaatccttcaagaagccagccattcgctggcttcttgcctctcaggaaatcacttatgtccaaatggcaactcgcctgatcctccttcaccacgtatgctttgcgtcaccttactatcaggacgctttagcccatgtcccgctttttgatttgtagttttgccctggttttactttatcccgccgggattgatatgtacctcgttggtttaccgcgcatcgccgccgatctcaatgccagcgaagcgcagttgcatattgcgttctccgtatatctggcggggatggcagctgcgatgttatttgccggtaaagtggccgatcgttcagggagaaagccggtcgccatacccggcgcggcgctatttattattgcctcggtgttctgttcactggctgaaaccagcacgttatttcttgcaggccgatttctacaggggttgggcgcaggctgttgttacgtagtggcgttcgctattttgcgcgacacgctggatgatcgacgtcgggctaaagtgctgtcattactcaacggtattacctgcatcattccggtgttagcgccagtgctcggacatctgattatgcttaaattcccgtggcagagtctgttctgggcgatggcaatgatgggcatcgcggtactgatgttgtctttgtttattttaaaagaaacgcgcccagcggcccccgcagcttcggataaaccacgagaaaatagcgagtcgctgcttaaccgttttttcctcagccgtgttgttatcaccaccctcagcgtttcggtgatcctcactttcgtcaacacgtcaccggtattgctgatggaaatcatggggtttgagcgcggtgaatacgccaccattatggcgctgaccgctggcgtcagcatgaccgtttcattctccacgccatttgcgctgggaatttttaagccacgtacgttgatgatcacctcgcaggtgttattcctggcggcggggatcactcttgccgtttcaccttcccatgcggtttctctgtttggtatcacgctgatttgcgccggtttctcggtaggttttggtgtggcgatgagtcaggcgttagggccgttttcattacgcgcgggcgtagccagctcgaccttaggtattgcgcaggtttgcggttcgtcactgtggatttggctggcagcggtggttggtatcggcgcatggaatatgctgatcgggattctgattgcctgtagcatagtgagcctgttgctgattatgttcgtcgcgcctggacgccccgttgccgctcatgaagaaatccatcaccacgcttgatctcaatctgctgctttgtctgcaactgctgatgcaggagcgcagcgtaaccaaagcggcgaagcggataaacgtgacaccttcggcggtgagtaagtcgctggcaaagttaagagcgtggtttgacgacccgctctttgtgaactcaccgctgggtctgtcgcccacaccgctgatggtcagcatggagcaaaatctggcggagtggatgcaaatgagcaacctgctgctggataaaccgcaccaccagacaccgcgcggcctgaagtttgagctggcggcggaatcaccgctgatgatgatcatgcttaatgcgctgtcgaaacagatctaccaacgttacccgcaggcgaccatcaaattacgtaactgggattacgattccttagatgccattactcgtggtgaagtggatatcggtttttccggtcgcgaaagccatcctcgctcgcgggagctgttaagctcgctaccgttagccattgattatgaagtgctgtttagtgatgtgccctgcgtctggttacgcaaagatcatccggcactgcatcaaacgtggaatctggacaccttcttacgttatccgcatatcagcatttgctgggaacagagcgatacctgggcgctggacaatgtgttacaggagctgggacgcgaacgcacgattgctatgagcctgccggaattcgagcagtcactgtttatggcagcgcaacccgacaatctgctactggcgaccgcgccgcgctactgtcagtactacaatcaactccatcaactgccgttggttgctcttcctctcccgtttgacgaaagccagcaaaaaaagctggaagttccttttaccctgctgtggcataaacggaacagccataatccgaagatcgtctggttacgggaaaccattaaaaacctttacgcgtcgatggcataaccgaatcgtatgaaacgcgacccaatttcacaataaaatgtaaaaaagttgtaataagcttgtctgaatcgaacttttagccgctttagtctgtccatcattccagtaaatgattactcttgtattcataatggaccattaagcatggagcgaaaaatggcgactcactttgcccgagggattttaacggaaggacatctgatttctgttcgtctcccctcccagtgtcatcaagaagcccgaaacattccccctcatcgtcaaagccgttttctggcgtccagaggtttactcgcagaactgatgttcatgctgtatggcattggcgaattgccggaaatcgtcaccctgccgaaaggtaaaccggttttcagtgataaaaatttgccttcgttttccatttcctatgccgggaatatggttggcgtggcgttaacaaccgaaggtgaatgtggcctcgatatggaactacagcgtgcgacgcgcgggtttcatagcccacacgcgcccgataaccacaccttttccagcaatgaatcgctatggatcagtaaacaaaacgatcctaacgaagcgcgggcgcagctcatcacgctgcgccgaagcgtgctaaaactaaccggtgatgttttgaatgacgatccgcgcgatctgcagctgctgcccattgccggacgcctgaaatgtgctcatgtaaatcatgtagaagcgttatgcgacgcggaagacgtgctggtgtggtccgtggcggtcacgcccacgattgaaaagctcagtgtctgggagttagatggcaaacacggctggaaaagcctgccggatattcacagccgcgccaacaatcctaccagccggatgatgcgttttgcccaactctctaccgtgaaggctttttcgccaaattgatagacaaccacaggagtcatcatgtctgaaaaattgcaggtggttacgttactggggagcctgcgcaaaggctcatttaatggcatggttgcacgtaccctgccgaaaattgctccggcgagcatggaagtcaatgcgttaccatccattgccgacattcccttgtatgacgctgacgtacagcaggaagaaggttttccagcaacggttgaagctctggcggaacagatccgtcaggctgacggtgtggtgatcgtcacgccggaatataactactcggtaccgggtgggctgaaaaatgccatcgactggctttcccgcctgccggatcaaccgctggccggtaaaccggtattgattcagaccagctcaatgggcgtgattggcggcgcgcgctgtcagtatcacctgcgccagattctggttttcctcgatgcaatggtgatgaacaagccggaatttatgggcggcgtgattcagaacaaagttgatccgcaaaccggagaagtgattgatcagggtacgctggaccacctgaccgggcaattgaccgcatttggtgagtttattcagcgagttaagatctaaataaaaaacccgccagcaatcatgcatggcgggtttttaacgcgctatcgattttagtgagcgtcgataaagacaatcttcaggataaacagcagcgcaacgatgattacgcacgggcttagatcacgcagacgtccggtaccgattttcatcacgcagtaggagataaagcccagcgcgataccttcggtaatcgagaagctgaacggcatcatcacggcggtaataaacgccggaacagattcagtaagatcctgccagttcacgcgtgccagactggaagtcatcagcacgccaacgtaaatcagcgcaccagctgcagcgtagcctggcaccatccccgccagcggcgacagaaagataaccagcaggaacagcagaccaacaaccactgccgtcagaccggtacgaccgccaaccgatacgccggaagaggactcaatataagccgtaacggaagaagtaccgataaacgaaccggtcacggaagagatactgtcgacatacagcgcctgcttcatgcgcgggaatttccccttctcatccgccagacctgctttatcggtcacgccaatcagcgtaccggaggagtcaaacaagttgaccaacatgaaagagaaaatcacccctgccagcccgaggttaaacgacccggctaaatctacatgacccacaactgtcattacgctcggcggcgcagaaacgatgccattgtagtgcacatcacccagcatccagcccagcagcgtcgtcaccacgatagaaaccagcaccgctgcgtgaatgttgcgcgaggccagaatagcaatgatgaagaagccgaggatacccagaagtacgctgtgagaagtcagattaccgatgctcaccagcgtttccgggttagcgacaatcacacctgcgtttttcagccccatcatgccaatgaacagaccgataccgctggtaatacccacacgcagactcaccggaatgttggctatcatccagtagcgaacgcggaaaatcgtcagtaacagcagacctatcgcgccccagaagattgcgcccatcccgacctgccacggcaagcccatcgcctgtacaacgacaaaagcgaagaacgcattcaggcccatagcgggtgccagtgcaactggcaggttagcaaacagtcccatcataatactgccgaatgcagcgatcagacaggtagtgacgaagacggcgctggtatccatgccagcaacgccaagaatttgcgggttaacaaaaacgatgtaaaccatcgtcaggaaggtggtaaaaccggcgatcacttcggtccgtgccgtcgtgccatgttcgcgcagtttaaacacgcgttccagcatcccctgaccagaagtctgggtggtatgttgatgactcattatctatttccgaacaaggagggaaaatccgtcgctatcgtataccaaaatgcgacaataggcgcgtttgtgagagacttttttattggatttacttatacggcaacgattgcgttgcgcaaatcggctctacgaaaacgttaaactgattaaaaaggaaaggcatgtcccggatagaagcggtatttttcgactgcgacggtacgctggtcgacagtgaagtcatttgctctcgcgcatatgtaacgatgtttcaggaatttggtattacgctcgatcctgaagaggtattcaaacgtttcaaaggtgtaaaactgtacgaaattatcgatattgtttcccttgaacatggtgttacgttagcgaaaacagaagctgaacacgtttaccgtgcagaagtcgctcggctgttcgattcagaactggaagccatcgaaggggctggagcgctcctgtcagcgatcactgcgccaatgtgtgtggtatctaacggcccaaataacaaaatgcagcattctatgggcaagctgaatatgttgcactacttcccggataaactgttcagcggctacgatattcagcgctggaagccagacccggcgttaatgttccatgcggcaaaagcgatgaatgtaaatgtagaaaactgcattctggttgatgactcagttgccggtgcacaatctggtatcgacgcaggtatggaagtgttctacttctgcgccgacccgcacaataagccgatcgttcacccgaaagtcaccacctttacccatctttcgcagttacctgaactgtggaaagcgcgtggttgggatattacggcatagttcttcacactcccttcacttaccccgcttaaattggcgctcaaaggtaagtaaagggagtttgatatgtctgtttcacgtcgggtaatacatcacggactttattttgcagttttaggaccgttaattggtgttctgtttcttgtcctctacatattcttcgcaaaagaaccgctggttctttgggtgataatacatccaatttttctcttattgtcgataactacgggagctattcctgcgttgttaaccggtgtaatggttgcctgtctgccggaaaagatcgggtcacagaaacgttatcgttgtctggctggtggcataggtggcgtcgttatcaccgagatctattgtgcagttattgtacatattaagggcatggcttcctcggagttgtttgaaaacattctttctggtgacagtctcgttgtccgcatcattcctgcattgctggcaggtgtggtgatgagcagaatcattacccgtctacccggattggatatttcatgtcctgaaacagactctttaagttaagcgggatactttatctttgggctactcaaaagcagacaggatgtttctatgactcaaaatatcaggccgttaccccaattcaaatatcatcccaagccactggaaacaggcgcatttgaacaggataaaaccgtagagtgcgattgctgtgaacaacagacgtcagtttattactcgggtcccttttattgcgttgatgaagttgaacatctctgtccgtggtgtattgcggacggttctgctgctgaaaagtttgcaggtagttttcaggatgatgccagcatagaaggtgttgaatttgagtatgatgaagaggacgaatttgccggtattaagaacacatatcctgatgaaatgctgaaagagttggttgaacgcacgccaggttatcatggatggcagcaggaattctggctcgcgcattgtggcgatttctgtgtttttatcggctatgtgggctggaatgatataaaagatcgcctcgatgaatttgccaaccttgaagaagattgtgagaatttcggtattagaaattctgatctagctaaatgcctgcaaaagggtggtcattgtcagggttatctcttccgctgtctccactgcggcaagctgagactgtggggtgatttttcgtagttatttaaataatgagaacaggccggagcgtaattcacacatccggccttatttcttaagcttaaccgagtgctaattctgcggcagcggctttatcagcgattaccatcagcgaaggatgcagctgcaacacggaagctggaacatcttcggtaaccggaccttgcagaacatttttcagtgcctgcgctttacccgcgccgctgacaattatcagcaagtttttcgccgccatgatgcttttcggccccatcgtcacgtagctgtcaggcactaacgaaaagtcgccgcccaactcgccatgcgccacaatatcaaccatctctccctggatcgggaactccacggtttgctcatggaaatgggtcgtattcggcaaattgccacaaaaatgaccatctgcacctaatcccagcaccaccaaatccagtccgccttcacgcgccagtttctgatcatgctcgcggtagttatcaatagtgagcttctggatattctcttctttgatccccgcaggggtgaaaaacagattacgcagattggtaatcgttacgccttctccctctttgccgcgaaatggaatttcatcaaaattatagaaatagcagttatcgtaccagggcttacctttaaccagggtggtgaggtattcatacatgcctttgggcgtgctaccggcggtaattgccaggttaacacgacgcgtcttcgacatataaccaagcagatggtgtgccgcgacacggctcatttcctggtaatcttcggtaatgattaatttcatcttaatgccttattttatttaaataatttctgtacaaaggctgcataggctggtcgccagacatccatttcatggttcagacccggatattcctggtaatcaaagttaatttttttctgctcaagctcagttttcagcccggcgatatccttgccggttacgacatctttatcccccacaaccacagtaaaattacgtagttgctggttgatagctgccggatcgttcagtcgggccgcgacaccttcatccggtacggttgtcgtggtaacaccactgaatgtggccagccagccaaagctttccagatgattcattccggaaaccagcgcctggtacccgccttgtgaaagccctgccagcgcgcggccatcggcatctttacggacattaaaacgcttgctaatcagcgggataatatcgttcatcagttcgcgatctgccgctttagcattcagcggataaaagactttacgtctttcctgaggcacgaaatcttcgggaataatgcccttcgcatcggtttctgtatccgggatcaccaccagcatcggtttaattttcccttcagcaagcaggttatccatgatttgcgggatacgcccctgatcgatagcggaacgtccggtatcaccaaagccgtgatagaaatagagcactggcaaaggctcgcccatgccggtgtatcctggcggggtccagacatacatctgacgttcagattgcaatgcgttggagtggtaagttatggcgatcaaatcaccatgcgcaacagaacgcgtatccagataactgcctggcaccagaatcatactggagttaacctggcgctgaggattagtcattgcggtgcctgtatcaatgctgcgtacaccatcaacattgaaaaaatactcgtacaggttgcctttcaggataggtgtgcgccacgaccagactcctgcttcgtctttggtcatcgggtgaatattgtccggaaccggaacacccaccactacagagacattttttgccccaggggcaaagtagcgaaaagtcacgctgttatcggcattgacctgagtcacatactgtttcaccgggatagtgggtgccgggctggctggcatatccgctgctatggcccactgagcagaaataccgctggcaatagccagcgttaaagcagcaatttttatattcatcgtaatattcctttcattaagttccattaccaccagatttcagcctgggcaccgacagcaaactggtcgtctttattgtcttcaaaggtgaagccatccagttcgttttccagggctttgatatacgtggcgtagaaacgaatttccggacgcgaggtcaacatactggtattgactttaaaggtatggaagagcgtggttttataaccagactcattaaatttattactattcgcatctttgttttgctgggtgaaatagcccagttcaacacctgtctggttatattggtcccaaatataggccgggcgaacaaccgcacgaatagattcgaaatcagagtgggcgcctgtttcgtagctatatatatcgttaccgaaggagtaaacaatcgcgttagctacaatgaaatgatcgccaatataggcttcgccctgcgaagtcagacgtaccgctgttccgccggtgtgatcaccataataacgaccattaaaggtggtaaatggacttgcgccagcataacggccaaagttactggcgatagagttattcgcgaccaggaaggagaattcgttgaagccacctttatcaaatttctgcgttaaagatgtgccaaacatccaggtatctttccagtcataatacccgttattatcctgattatctttttccgatgcgctttcgtttgccgtgacataacgaccacttaccattaaggtggctttatcccataacgggatatctttatagcgtaaatcaatggtattggtattaatctgctgtttgttttgcaggctgcgatcgtaatcatcgacatcttcgcgaaccagcgcgatatcaattttacccggaccgactttccagttttccagacctacacccgctgcggcatcagtacgctgcgttttccagtcaagcatctggatttcaattttcggcgcaccgtgtttacccacccagaaatcagcctctggcgcaaagggcaggaaacctttggtggtaacgtacatatcggagaactgcatatagttctcgccaccggcgttatcgccaaaccagccggtagagtactgctgaccaacgttaccatccatcatcacaacggcatcaacccgtttgccgttttcgttgtagacacgttgttttaactgcaaatcaaaccagccggagtattcgttaccaaagcggcccagagaaccaatcgcccatgatttaggtgaaccatgagaggcggtcccccaaccagaacggtaatagccgttgtaactaaagccaatttcatctttcacaaatttactgaaatctttcagagtcatggaagaataaatcgagcctgtctcactggcatttttctcttcatttttgaccagtacagcatcaggttttgcggcactactggtcgggaacggattggcggcatacccttgatcattcgtacttacgctacgattcaccgtcgctggcgtatactttttcttctcttcatctttatactttttgagttcgctttgcgtttctcttaacgccttttctaataactcaaggcgttgttccaccgttaatgattcagccaatgattgtgcagaaaaggctaacggtgccattaataagatggcagaggtaataagatttcgtctaaacataatatccctttatggtgcaaagaaagaattaacgcatcgcatccagactgttctgaatgcgacgataattaaggtgctttaatggttattttttttaatgacagcccccgcgtcttgatcacctctgcataccatccgaagcttttcttgcgtgttcttgtgaggcttccttcgccattatcatcacgatccacataaataaagccgtagcgcttagacatttgtgaatgagatgcactgactaaatcaattggcccccaactggtgtaccccataatatccacaccatcggcaatcgcttcatttacctgtaccaggtgatcgtttaaataggcaattcgataatcgtcctgtatcgaaccatccgcttcaacgctgtcttttgcgcctaatccgttctcgacaataaataacggtttttgataacgatcccaaagcgtatttaacagaacccgtaatccaaccggatcaatttgccacccccactctgaacttttcagatgcggattggggatcatattcagtatgttgccctgcgcatttttattaatgctttcgtcgtgggaaacacaaccagtcatgtaataactaaaagagatgaaatcgacggtatgttttaaatcttctgcgtcactttcagtcatctcaatggtgatattgtggtcgcggaagaaacgctgcatatagccgggatactggccacgcgcctgaacatcaccaaagaacatccagcgccggttctcttccatggcctgcaacatatcctgtggctggcaggtgagggggtaaaccagcccaccgagaagcatattgccgattttcgcttcggggagcaggctatgacaggctttaactgcccgcgcactggcaaccagttgatggtggatagcctgataaacttccgcctcgccactctcttctgccagccccacgcccgtgaatggcgcgtgtaacgacatgttgatttcattaaacgtcagccataacgccactttatgttggtagcgagtaaagaccgtgcgggcgtaatgctcgaagtgatcgatgaccgctcgattagcccaaccgccgtagtttttcaccagcccatatggcatttcgtaatgggataacgttaccagcggcttgatccccgcctgcgccatttcatcaaacagccgatcgtaaaacgctaaccccgcttcattcggttcgacttcgtcgccctgagggaaaattcgcgcccaggcaatggaaatacgcagacaggtgaagcccatctcggcaaataacgcgatatcttccgggtaacggtgataaaaatcgatggcgacatctttgatattctctttccccaggatgcgcggttccatttttcccattacgccatgaggctgtaaatctgaggtcgagatccctttgccatcttcctgccaggcaccttccacctgattggcagctgttgcgccaccccaaagaaatgtttctggaaatgctttcataattaactccttttatcgttagcgaatgatggataacagcggttcacctgcgcttatctgcgccgtgccgtggggtaatacgtccgtaaaatcatcgctattactgattaataccggcgtcgtcagatcaaatccggcctcgcgaatagcagggatatcaaaagaaatcagccgatcgcctgtattgaccttgtcacccacgttgacgtgagcggaaaagaatttgccgtccagttttacggtgtcgataccgacatgaatcaggatctccacaccatcatctgactcaatgccaatggcgtgtaatgtggcgaacaacgaagcaattcgacccgcaaccggagaacgcacttcaccaaccgagggcagaatggcaatacctttacccaacaggccactggcaaacgtggtatcagcgacgtgaatgagcggcacaatctctcccgtcatcggtgaacagataccgccctgctcaggtggtgtaataacctctggtgttttctcttgcggggcaccctgcgctggctgacgtttagcggtgatgaaatgaagcatcaccgtaccgacaaatgcgcaaccgatggcaatgacaccgccaataacgctggcccagacggtgaaatcaattcccgttgacgggatggtttgcatgaaggtgaaaatacttggcaaaccaaaggagtagactttcgtttgcgcgtagccaataatggtggcccccaaagccccactgatacaggcgataacaaaggggtacttacgcggcaggttgacgccatataccgctggttcggtgataccaaacagactcgtcaacgccgctgatcccgccaccacttttttctgcgcatcgcgttcgcagaggaagacgccgagcgccgccccgacctgcgccataatggcgggcattaacagcgggatcatggtgtcgtagcccagcacggtgaagttattgatacacagcggcaccaggccccagtgcagtccgaacatgacgaagatttgccagaagccgcccattaccgcgcccgcaaatgcaggaaccgcctgataaagccagagataaccggcggcaatcagttcgcttatccaggttgatagcggccccaccagcagaaaggtgacgggtgtgataaccatcagacatagcaatggtgtgaagaaatttttgattgccgacggtaaccacgcattaagtcggcgttccagaatgctgcacaaccaggcagaaaaaataatgggaataaccgatgacgagtaattcaacaatgtgaccggaatacccaggaaatccagccccagcgcatccgctttttgcccgttctcgaaagcagtcagaattaatggatgcactaacgctccaccaatcaccatggcagtaaatggattaccgccgaagcgtttccccgcggtgtatcccaggattatcgggaagaaccaaaacaaggcatcactggcgctgaataaaattaaataagtaccactttgttcggtcgtccactgaaaagtgagcgccagagccagcatacctttcaagatcccggttgccgccatcaaaccgatcagaggcgtaaaaatacctgaaataacataaacaaagcggtttagcagattacctttatcatcattttccggtgcctgttgcgctttttcgtcaaggcctgccacactgttaaccgccaggaagacatcggccacatggttacctatgaccacctgaaactggccaccgctttccaccaccataataataccgggggtctttttcagtacctctgcttgcgctttgctttcatcctttaatttaaaacgtaatcgcgttgcgcaatgcatcagactcacaatgttatctgcgcccccgactcctgcgactatttttctggctaactccgtcataacttgccctctaccgctttgcggcaaaactccaaaaaaaaacctgaaaaaaacggcctgacgtgaatcaagcaatttttttcaggttttgcccgcttagtgcggtaacaatcctttactcagtaataatatttcagtgttctttgcgcacgcgctctatatttatggctaaaaacataatctctgcgggtgaaattttacgttgatactgcaaaccaataaaaatggcgatccgttccgcacattgccatgcttgcgggtaattttgttttactgcttgttgtaatgattcatcactatcgttaattgaagcatgttcaagaatacgccaggataaaaacttcagatgtgtaaccagtcgctgataactcaagctttcttcctggtaattaaggctcgagtaggcagcctggcggctgcggcttgtcatggcctgaaattaccgttataaaaacagacaatatcattgtctttcaggtagttatatgtcccgttcagctaaaccccgtaaacgaaaacctgcccctcaaagaagcaaacttccccgctatgtcgtgaagcttcacgacgatgacttctttgacgaagaagacgcagaagctctgcgctttgataattttgacgatgccgttgagtgctgcgcagacctgaatattcccttctttgtggatgccggaaacaaaaagctggtcttctggtttgttcgtgtcgatgacgaagggtatcctgaaatagcccgctgcacggagcgggagtttgcgaccattcttgccggtatcagcgccggcggcatgtactgcccggagtgtggcacggttcactggccggacggagtccccccgcccttctgatgcttccccgttttgccgacatttttcagcagggaaaccgctggcttaactggctggagaaacaaccggaaggttcagtgcgtccggtagtcattgagtctgtgacaaaaatcatggcctgcgggaccacgctgatggggtacacacagtggtgctgttcatctccggactgcagccacataaaaaagatctgcttccggtgtaaaagtcgctcctgcccgcactgcggagtgaaggctggcgcacagtggatacagtatctgctgagtctggttcccgactgtccgtggcagcatattgtgttcacacttccctgccagtactggtccctggtgttccacaaccggtggttactggcagagatgagccgcattgctgcggatgtgatacaggaaatctgccgccaggcagatgtggtgccggggatattcacggtcatccacacatggggacgtgaccagcagtggcatccgcacattcacctgtcgacaacgaccggcggcgtgacatcagaccacacctggaaaaaccttcatttttacgcccgtaaggtgatgagtatgtggcgttaccggataacgcggttactgtcacggaaatatccggacctggtgataccggatgcgctggcagcagaaggaagcagtaaacgggactggaatcgcttcctggacagtcattaccggcggggctggaatgtcaacgtatcccgggtgatggataacgccacacatgtggcggtgtacttcggctcttacctgaaaaaaccgccggtgccgatgagccgtctggagcactatgctggtcaggatgaaattggtctgcgttacaacagtcaccggacaaaacgggaagaatacctggtgatgagtggtgatgagtttatggaaaggttctcctggcatgtggcggataaggggttccgtatggtgaggtactacggtttcctgagtccggtaaagcgccggttactggaagatgttgtgtacgtcataacggagacggtgagaaagacggcgatgcaaatcaggtggagagggatgtatcagcggttactgaaggttgacccgctaaagtgcatcctgtgcggatgtcagatgcgttttacggggctgaagcggggctaccgtctgacagagctggtcctgatgcatgagccactggcgcaacagcgggtgtgcggctgagagccgcatcggggaagttgcgtccattttcaggggaatggagtaaaaaaaccatcagtgatatacagtatcactcgataagatccatttaattgatggcggtgcactcatggcacgcaggcagtgttgaataaacatccgtttttgggtgtttttttaatctttttgggatttaaattcctatcgatgaactgaaattttattaattgcagcatttcgcgcattaactgcgtgacacctgcaacatcctccatatttccgctcatttgggcactgaccagatgcatggcaataaagcccacttcatctttcggtaactgcacgcccaaccgtttatcaataatggttaacgcttcttcccctagctggaactctttcgggtaaagccgctggatatcccacagcaacgggttgggcagcaacacgttttgctgaaagcgtttaatcgcaaactggcaatggtcagttagcgagatataaatactgtcctgtaattttcccaagcgctcctgcgctaaagagataatacgatcacaggttgccatcacctcaagaggaatatgacttaagagttcgcttaatcgcccgttcagttcatgactgctcaaggcatactctttttctattccacttgagttaattctttcgccagcgcgtttttgaaagccaattccgcgccccatgacgactttttcccgctgttgatcatcaataaccaccacaacattattgttgagaattttggtgatttgcatgttcatagcaaggaccttttttataaacaaaaaaacccgacttcaccagtattctctggttatgtcaggttttgcctgcgaatgcagtaacaatccagtcatttattaatggtttttataacgaacatccaggttcggaaattaatttaattgcgtgcagagaaaatagcaatgcgctattgataaaaatatgaccatgctcgcagttattaactttgtgtaattttaggaatttataaagttatatataacaaatcccaataattaagttattgggatttgtctggtgaattatttgtcgctatctttccccgccagcagtttatccagctcatcgccaccgacgtgacggaaatcctgccccttcacgtagtagaagataaactcacaaatattctggcagcggtcgccaatacgttcgatagaacgcgcgcagaacagcgcagtaagtacgctcggaatggtacgcgaatcttccatcatgtaggtcatcagttgacgaacaataccttcgtattcctgatcgacttttttatcttcacgataaatacgtaccgcttcgtcaatgtccatccgcgcgaacgcgtccagcacgtcgtgcagcatctggatggtatgacggcccagcgactccagacttaccagcaacggctgatgctgctgggagaatttctccagcgcagtacggcagattttgtccgccacgtcgccaatacgctccagctcggcaatggttttactgatcaccataaccagtcgcaggtcgctcgccgtcggctgacgtttggcgataatgcgcacgcaggcttcatcgatcgccacttccatcatgttgacgttcttgtcgccttcgatgacgcgcttcgccagatcgctgtcctggttatgcatcgcggtgattgcatcagaaagctgctgctccaccatgccgcccatggtcatcacctgcgtgcggatactttccagttcggcgttgaactggccggaaatatgtttattaagattgagactgtccataacgcactcctgaatcaaccgtaacgaccggtgatgtagtcttctgtttgtttcttcgctggcttggtgaacagatcgtccgtgttgctgaactcaatcaattcgcccaggtacataaacgccgtgtggtcggaacaacgcgcagcctgctgcatgttgtgggtgacgatcaccacggtgtaatcctgcttcagttcggtgatcagctcttcaatacgcccggtagagatagggtcgagcgccgaacacggttcgtcgagcagcagcacttccgggcgaatggcgataccacgcgcaatacacagacgctgttgctgaccaccagagagagagtaaccgctctggtgcaatttatctttggtttcgttccacaatgcggctttggtcaatgcccactgcacgcgctcgtccatgtcggcacgggagagcttctcaaacagacgaacgccaaaagcgatgttgtcgtagatggacatcggaaacggcgtcggtttctggaacaccatgcccactttcgcacgcagcagtgcgatatcctgagagttggtcaggatgttgtcgccatcaagcagaatttcaccttccgcacgctgctccgggtacagttcaaacattttgttgaaggtacgcagcagcgtcgatttaccgcagccggacggcccgataaacgccgttacctggtttttagcgatatccaggttgatgtttttcagggcatggaatttgccgtagtagaagttcaaattacgaacctgaattttactcggggcagtttcaaccatactcattgcaatcttttcctcatcgcgcctgatgcacttcgctaatcaggcttaccgtaggccggatcaggcgttcacgccgcatccggcaaagtgttaaccgtgtacagagtcaaaaaggcgctcggtcggtcccctcgcccctctggggagagggttagggtgaggggaaaaccgtgtcagcaatatcaaccgtgtttattcttcgcaaaaacaacgcgcgccagaatgttcagcagcagtacgcacagggtaatgatcaataccccggcccaggccaattgctgccattccgcaaacgggctcatcgcaaacttaaagatcgtcaccggcaggttggcgatcggctgcatcatgtccgtgctccagaactggttggagagcgcggtaaacagcagcggcgcggtttcaccagcaatacgggcaatcgccagcaggataccggtcataatcccggacaccgacgctttcagcgtaatcgcagagatcatcttccacttcggtgtacccagcgcataagccgcttcacgcaggctgtacggcaccagtttcagcatgttctcggtggtgcggataacaatcggcacctgcaacaacgccagggcaatcacgcccgcccagccggagaagtgctccatctgcgccaccacaatggtgtaaacaaacagaccaaccacaatcgacggcgcagagagcagaatgtcgttaatgaagcgaatcacttctgccagccaggatttacgaccatattccgccagataaatccccgccataatgcccagcggcgtaccgaataccgtggcccacaaaattaacagcccgctacccgccagagcgttcgccagaccaccaccttccgtattgggcggcggcgtcatttcagtgaacagcgccagcgacataccgtcgataccgcgagtgatggtggacattaaaatccagatcagccagaacaggccgaaggccatcgtcgccatcgagagcgtcagcgcaatacggtttttgaggcggcgacgcgcctgcattttgcggcgagattcagccagcgccgcagtggtttgcatttcaaccatagccattagcgtgccccctcattcttagccaggcgcataatcataaacttcgatgcggcgaggacgatgaaggtaatcacaaacaggatcaggcccagttccatcagtgcggcaacgtgcagaccggattccgcttccgcaaattcgttcgccagcgcagaggtgatactgttgcccggcatatacagcgaggcgctgtcgagctggtaggtgttaccgatgataaaggtcaccgccatggtttcaccgagcgcgcggcccagccccagcatgatgccgccgataacaccatttttggtgaacggaagaacgatacgccagataacttcccaggtggtgcagccaataccgtaggccgactctttcatcatcaccggggtttgttcgaacacatcacgcattaccgccgcaatgtacggaataatcatgatggcgaggatcacgcctgccgcgaggataccgataccaaatgcggagccagagaacagcgcgccaacaatcgggatattcgacatgatattgccgaccggctcctgaaagtaaacggcgaacagcggcgcaaagataaacaggccccacatgccgtaaacgatacttggaatggctgccagcagctcaatggcgatacccagcgggcgtttcagccagccaggcgcaagctcagtcaggaacagggcgataccgaaactcaccgggacggcgatcagcagcgcgataaacgaagtcaccaacgtaccgtagatcggcaccagcgccccgtagatatcgttcggtgcatcccactctttggtccataggaaagccagaccaaatttctgaatgctcggccaggaggagatgatcagagagacaataatgccacccaacatcaatagcacaatcagcgccgccagttttaccagcacgctgaaaattatgtcgccctttttacccggtgggttaaaagcaggcttggttgcagccataagttactcttcagttaaacgcgtttacaaagtcattttgtaatgccggatgcggcgtaaaacaccgtacccggcctggagttttattagtacagcggcttaccgctactgtctttaatattggtcttccacgcagcgcgaacctgttcaactacactatccggcaggctggcgtaatccaggtcgttcgcctgtttagccccggttttgtacgcccagtcgaagaatttcagcacttctgtgccttgttctggtttcttctgatctttgtggatcagaatgaacgtggtagaggtaataggccatgcatcttcgcctttctggttggtcagatcctgagcgaaggttttgctccagtctgcaccttttgctgcattagcgaagttttcttcggtcggactaaccggtttaccatcagcggagatcagtttggtgtacgccaggttgttctgcttcgcgtaagcatattcaacataaccaattgcacccggcagacgctgaacgaacgcggcgataccgtcgttacctttaccgcccagaccgatcggccattttacggtagagccagtaccaacgttgtttttccactcttcgttcactttcgccaggtagctggtgaagacgaaggaagtcccggagccatctgcgcggcgtactacagcaatgttttgtgaaggcagtttcagacccggattcagtttggcgatggcttcatcatcccacttcttgattttgcccaggtagatgtcgccgagggttttaccatccagcaccagttcgccagacttcagccctggaatgttaaccgccagcaccacgccgccaatcacggtcgggaactggaacagaccttcctgagccagtttttcgtcagacagcggcgcgtcagaggcaccaaaatcaacggtattagcgataatctgttttacgccaccggaagaaccgataccctggtagttaactttattaccggtttctttctggtaagtgtcagcccatttggcatacaccggcgcagggaaggttgcacctgcacctgtcaggcttgcttctgcaaacacagagaaagcactcatcgataaggtcgcggcgacaacagttgcgacggtggtacgcataactttcataatgtctcctgggaggattcataaagcattgtttgttggctacgagaagcaaaataggacaaacaggtgacagttatatgtaaggaatatgacagttttatgacagagagataaagtcttcagtctgatttaaataagcgttgatattcagtcaattacaaacattaataacgaagagatgacagaaaaattttcattctgtgacagagaaaaagtagccgaagatgacggtttgtcacatggagttggcaggatgtttgattaaaaacataacaggaagaaaaatgccccgcttacgcagggcatccatttattactcaaccgtaaccgattttgccaggttacgcggctggtcaacgtcggtgcctttgatcagcgcgacatggtaagccagcagctgcagcggaacggtgtagaagatcggtgcaatcacctcttccacatgcggcatctcgatgatgtgcatgttatcgctacttacaaaacccgcatcctgatcggcgaagacatacaactgaccgccacgcgcgcgaacttcttcaatgttggatttcagtttttccagcaattcgttgttcggtgcaacaacaataaccggcatatcggcatcaattagcgccagcggaccgtgtttcagttcgccagcagcgtaggcttcagcgtgaatgtaagagatctctttcaacttcaatgcgccttccagcgcgattgggtactgatcgccacggcccaggaacagcgcgtgatgtttgtcagagaaatcttctgccagcgcttcaatgcgtttgtcctgagacagcatctgctcaatacggctcggcagcgcctgcagaccatgcacgatgtcatgttcaatggaggcatccagacctttcaggcgagacagcttcgccaccagcatcaacagcacagttaactgagtggtgaatgctttagtggatgccacgccgatttctgtacccgcgttggtcattagcgccagatcggattcgcgcaccagagaagaacccggaacgttacagattgccagtgaaccaaggtaacccagctctttcgacagacgcaggccagccagggtatccgcggtttcgccagactgtgacaaggtgatcatcaggctgttacgacgcacggcagatttgcgatagcggaattcagaggcgatttcgacgtcgcacggaatacctgctagcgattcaaaccagtagcgggaaaccataccggagttataagaagtaccacaggcgaggatctgaatatgctcaaccttcgacagcagttcgtcggcgttcggtcccagctcgcttaaatcaacctgaccgtggctgatgcgtccggtaagggtgtttttgatcgcgttcggctgttcgtagatctctttctgcatgtagtgacggtaaatgcctttatcgcccgcgtcatattgcagattggattcgatatcctgacgttttacttccgcgccagttttatcgaagatgtttaccgaacggcgagtgatttccgcaatatcgccctcttcaaggaagataaagcgacgggtcaccggcaacagcgccagctggtcagaagcgataaagttttcgcccatccccaggccaatcaccagcggactaccagaacgtgccgccagcagggtatccgggtgacgggagtccatgatcactgtaccgtacgcaccacgcagctgcgggatagcacgcagaacggcctcacgcagagtcccgccttgtttcagctcccagttcaccagatgggcaatcacttcggtgtcggtttcagaaacgaaggtatagccacgcgcttttagctcttcacgcagcggttcatggttttcgatgatgccgttatgcaccaccacaatgtgttcagaaacatgcggatgcgcattcacttctgaaggttcaccgtgggtcgcccagcgagtgtgagcaataccagtgccgccatgcagaggatgttcttccgctgcctgtgccagcatctggactttaccgaggcgacgcaggcgggtcatatgaccttctgcatcaacaacggccagaccggcagagtcatatccgcggtattccagacgacgtaaaccttcaagaaggatttctgctacatcacgttgcgcgatcgcgccaacaattccacacatagtttttgattccgatttatatcgttgtcggtcaacctgtatgcccgttttttcgggcgccccgagccttgtagagagtggggttatttttatagttactgcttgtgggagggagattatgttatctcctcatcccatgtgaccgggttagccggccagaatcactttttctttaccggacgacgccagccttctttctgagtctgcggcacacggctgatagctaatgcattttcgccgacattacgcgtcacagttgtacccgcagcaatggtcgcgcctttgcctactgttaccggggccaccagctgagtgtcggaaccaacaaacacatcgtcgccgataatggtcttaaatttattcgcaccatcgtagttgcaggtaatggttcccgcgccgatgttaacgttatcgccaatttccgcatcgcccaggtaagtcagatgaccagctttcgagcctttacccagacgcgcttttttcatctcaacgaagttaccgacgtgagcaccttccagcaactcagcaccaggacgcaaacgggcaaacgggccaatggtacaggccgctgccagattcgcatcttccacaacggtatacggactgatttcgcaatcatcgccaatcacgctgtttttaatcacgcaaccggtgccaattttcacgcgatgaccgagagtcacgttgccctcgatgataacgttagtatcaatttcaacatcgcgcccgtgagttagcgtaccacgcagatcaaaacgcgctggatcgcgcagcataacgcctgctaacagcagtttttcagcctgttcggactgataaacacgctccagacgggagagttgcaggcggttattcacgccttctacttcgcttaaacgttgcggatgaacggcgacgatttcacgcccttcctgatacgccagcgcaataatgtcggtgatgtagtattcgccctgagcattattgttggtcagcttcgccagccagcgtttcatatctgcgccgttggcaatcagaatgccggtgttgatctcctgaatctgacgctgctcgtcggtggcatctttgtgctcaacaatgccggtaactttgccgttttcacgggtgatacgtccataaccggtcggatcatccagtttcaccgtcagcagaccaatgccaccctgcggtttagcatcacgcagacgctggagtgtttcgacagagatcagcggcacgtcgccgtagagcattaaaatgtcttcatcatcggcaaagaaaggtgcggcctgctgcattgcatgacccgtacccagctgctctgcctgaagcacccagttaaggttgtcgtctttcagcgcctgttttagcagatcgccgccgtgaccgtacaccaggtgaacgtgcgctgcgcctaattcattcgcagcatcaatgacatgctgaaccatcgctttcccggcaagggtatgcagcactttcggaagatcggaatacatgcgcgtgcctttgcctgcggcaaggatcactacgctcatagcattattcaacatacgcgtcctgactgtaatttgagaacgaatttaaaccgcttcaccttgaaaaaactacatttttttcatcgtgaaatggacagaggataaattgttcaataacggattatccccgctgacgaaagcgccattttcgaccatcgtcacgccttttgtctgcagaaaattaaggcagtaccttaatttaagcgtcaggtggatgtttttgctcttatttcgatcaatgaataaacaggaaaacaggggggttttatatcagcaggatctatgtcgagtaggcagcctggcggctgcggcttgtcatggcctgaaattaccgttataaaaacagacaatatcattgtctttcaggtagttatatgtcccgttcagctaaaccccgtaaacgaaaacctgcccctcaaagaagcaaacttccccgctatgtcgtgaagcttcacgacgatgacttctttgacgaagaagacgcagaagctctgcgctttgataattttgacgatgccgttgagtgctgcgcagacctgaatattcccttctttgtggatgccggaaacaaaaagctggtcttctggtttgttcgtgtcgatgacgaagggtatcctgaaatagcccgctgcacggagcgggagtttgcgaccattcttgccggtatcagcgccggcggcatgtactgcccggagtgtggcacggttcactggccggacggagtccccccgcccttctgatgcttccccgttttgccgacatttttcagcagggaaaccgctggcttaactggctggagaaacaaccggaaggttcagtgcgtccggtagtcattgagtctgtgacaaaaatcatggcctgcgggaccacgctgatggggtacacacagtggtgctgttcatctccggactgcagccacataaaaaagatctgcttccggtgtaaaagtcgctcctgcccgcactgcggagtgaaggctggcgcacagtggatacagtatctgctgagtctggttcccgactgtccgtggcagcatattgtgttcacacttccctgccagtactggtccctggtgttccacaaccggtggttactggcagagatgagccgcattgctgcggatgtgatacaggaaatctgccgccaggcagatgtggtgccggggatattcacggtcatccacacatggggacgtgaccagcagtggcatccgcacattcacctgtcgacaacgaccggcggcgtgacatcagaccacacctggaaaaaccttcatttttacgcccgtaaggtgatgagtatgtggcgttaccggataacgcggttactgtcacggaaatatccggacctggtgataccggatgcgctggcagcagaaggaagcagtaaacgggactggaatcgcttcctggacagtcattaccggcggggctggaatgtcaacgtatcccgggtgatggataacgccacacatgtggcggtgtacttcggctcttacctgaaaaaaccgccggtgccgatgagccgtctggagcactatgctggtcaggatgaaattggtctgcgttacaacagtcaccggacaaaacgggaagaatacctggtgatgagtggtgatgagtttatggaaaggttctcctggcatgtggcggataaggggttccgtatggtgaggtactacggtttcctgagtccggtaaagcgccggttactggaagatgttgtgtacgtcataacggagacggtgagaaagacggcgatgcaaatcaggtggagagggatgtatcagcggttactgaaggttgacccgctaaagtgcatcctgtgcggatgtcagatgcgttttacggggctgaagcggggctaccgtctgacagagctggtcctgatgcatgagccactggcgcaacagcgggtgtgcggctgagagccgcatcggggaagttgcgtccattttcaggggaatggagtaaaaaaccatcagtgatatacagtatcactcgataagatccatttaattgatggcggtgcactcatggcacgcaggcagtgtcgaataaacatccgtttttgggtgttttttaatctttttgggatttaaattcctatcgatgaacgctattcaggacgggtcacacgcgcaaaaaaaagccagcctgtttccagactggcttttgtgcttttcaagccggtgttacatcgcttttttggtcaactcgataacgcgcagctgcgcgatcgctttggccagttccgcagacgcctgagcgtaatctacgtcgccgtgagagctgctaatgtgctcttcagccttacgtttcgcttccatggctcgcgcttcgtcgagatcctggccgcgaattgcggtgtcggccagaacggtcacgttgccaggctgcacttcaagaatgccgccagacagatagataaactcttcgtgaccgtgctgtttcacgatgcgaatcataccaggcttaatggcggtgagcagcggtgcgtggccagggtagatccccagttcaccttcgctacccgttacctggattttctcgaccagaccagagaacatttgttgctctgcgctgacgacgtccaggtggtaagtcattgccatatcaccctccgattaaggcgttaaagttttttggctttttccacagcttcttcgatggaaccgaccatgtagaacgcctgctccggcaggtgatcgtattcgccttccatgatgcctttaaagccacggatggtgtctttcagggagacgtatttacccggagaaccggtgaatacttctgccacgaagaacggctgggacaggaagcgctggatcttacgagcacgcgctaccaccagtttgtcttcttcagacagttcatccatacccaggatggcgatgatgtctttcagttcctgataacgttgcaggatggactgaacgccacgcgcggtgtcgtagtgttcctgaccaaccaccagcgggtccagctgacggctggtggagtccagcgggtcaacggccgggtagatacccagagacgcgatctgacggctcagtaccacggttgcgtcaaggtgcgcaaaggtggttgccggagacgggtcagtcaagtcatccgcaggtacgtatactgcctgtacggaggtgatagaaccagttttggtggaggtgatacgttcctgcagaacgcccatctcttccgccagggtcggctgataacctaccgctgaaggcatacggcccagcagtgcggatacttccgtaccggccagggtgtaacgatagatgttgtcaacgaacagcagaacgtcacgaccttcgtcacggaatttctcagccatggtcagaccggtcagagcaacgcgcagacggtttcccggcggctcgttcatctggccatacaccagggatactttgtcgataacgttggagtcggtcatttcgtggtagaagtcgttaccctcacgagtacgttcacctacgcccgcaaacacagagtaaccggagtgctcgatcgcgatgttacgaatgagctccatcatgtttacggttttacctacacccgcaccaccgaacagaccaactttaccgcccttagcgaacggacacatcaggtcgataactttgataccggtttccagcagttcctgagagtttgacagctcttcgtaggaaggtgctgcgcggtgaatcgcccaacgctcttcttcaccgatctcgcctttcatgtcgaccggttcacccagtacgttcatgatacggcccagagtcgctttacctaccgggacttcaatcgggtgttcgaggtcttttacatccagaccgcgacgcagaccgtcggaggaacccattgcgatggtacgtacgataccgccgccgagctgctgctgaacttccagcaccagacgctcattaccatttcgcacctcaagagcatcgtacacgcgcggtacggcatcctgagggaattcgacgtcaactacggcgccgattacctggacaatctttccagtagccatcttaaatcctctacgaaataacctgtttaaaccgcggcggcccccgagacgatctcggtgagttcctgagtaatgctggcctgacgagctttgttgtataccaactgcagctctttaatcaggctgccgccattgtcggtcgcggctttcatcgccaccatacgggcggcctgctcgctggccaggttttcaaccacgccctgataaacctgagattcgacataacgacgcagcagggtatccagcaacgccttcggatcgggttcgtacaggtaatcccaggatttatgtttcagatcatcatcatctgatgccggtaacggcagcagctggctgatggtcggaacctgagacatggtgttaataaatttgttgctgacaatgtaaagcttgtccagacggccttcgtcgtaggcctgcaacatcacttttaccggaccgatcagttcggacagggaagggttatcccccatgccggtgacctgggcaacaacattgccgcccacggagttgaagaacgacacgcctttcgagccgatcattgcgaggtcgcattgaacgcctttgtcggtccaggtcttcatttccgccagcagttttttgaacaggttaatgttcaaaccaccgcacaaaccacggtcggtcgacaccaccaggtagcccacgcgtttaacgtcgcggtcttccaggtaagggtgcttatattccagattaccgtgtgcaaggtgaccaatcactttgcgcatggtttctgcataaggacggctggccgccatgcgatcctgcgatttacgcattttggaagcggcgaccatctccatcgctttagtgatcttttgcgtgttctggacgcttgcgatcttactacgtatctcttttgcgccggccatgagcttctcctcaatgccttgcggcctgccctaaggcaagccgccagacgttaccaggattgggttgctttgaaggaatcgaggatgcctttcagcttgccttcgatttcgtcgttgtagccaccggtctggttgatctcttgcatcaacggagcgtgatcacggtcgacgtaagccagcagagcggcttcgaagctgccaattttcgacagttcaacatccgccaggtaaccacgttctgctgcgaacagaaccagagactgctgcgcaacggacatcggcgcatactgtttctgtttcagcagttcggtcactttctgaccgtggtcaagctgcttacgtgttgcatcgtcaaggtcggatgcaaactgagagaacgctgccagttcacgatactgtgccagagcggtacggataccaccggacagttttttcatgatcttggtctgtgctgcaccaccaacacgggatacggaaatacccgggttaaccgcaggacgaataccggcgttgaacaggttggtttccaggaagatctgaccatcggtaatggagattacgttggtcggaacgaacgcagaaacgtcacccgcctgagtttcgataatcggcagtgcggtcagagaaccggttttccctttcacttcacctttggtgaaggcttcaacgtattcggcgttaacacgtgcagcacgctccagcagacgagagtggaggtagaaaacgtcgcccgggaatgcttcacgtcctggcggacgacggagcagcagggagatctgacggtaagcaacagcctgtttagacaggtcatcgtaaatgatcagcgcatcttcaccgcggtcacggaagtattcgcccattgcgcaaccggcatacggtgccaggtattgcagtgcagcggattcagacgcggttgctaccacaacgatggtgttagccagtgcgccgtgctcttccagtttacgtaccacgttagaaatggtggacgctttctggccgatagcgacatagatacatttgataccggaatcgcgctggttgatgatggcatcgatagccagtgcggttttacctgtctgacggtcaccgatgatcaattcacgctgaccacgaccgattgggatcatggagtcaacggctttataaccggtctgtaccggctgatctacggactgacgttcgataacgcccggagcgattgcttctacagcagagaagccgtcgtgatccagcggacctttaccgtcgattggtgcacccagagtgttaaccacacggcccagcaggccacggccaaccggaacttccaggatacggccagtacacttaactttcatgccttcggcaaggtcagcgtacggacccataacaaccgcacctacagagtcgcgctcgaggttcagtgcgatagcgtaacggttacccggcagggagatcatttcaccctgcatacaatcggccaggccgtgaatgcggataacaccgtcacttacagaaacaatagtaccttcgttgtgagcttcactcacaacattgaactgagcaatgcgctgcttgatcagttcgctgatttcggtggaattcagttgcatgctccagtccccttaagactgcaagacgtctgcaaggcgctcaagacgaccgcgtacgctgccatcaatgaccatatcacccgctcggatgataacgcctgccattacagacttatcgattttgcaattcagcttaactttgcgtgacagacgtttttccatcgcagcagaaattttcgcgagctgttgttcactcagtgcggcagcggaaatgacgtctacctcagcggtagcctcactcacggcacgcaggtgaataaactgctccagaacatccgggagcgcgttaagacgaccattttcagccataacccgaatcaggttctgaccgttttcgtccagttgctcaccacaaactgcgataaacgactcggcgagcgtttctggcgcaagcgcgccagagagaagctctgccatttgttcgtttttggttacctcggcggcaaacgccagcatgtcctgccagcgttctacactttggtgttcgacggcaaagtcaaaagctgctttggcgtaggggcgagctaccgtaataaattcagacatcagcccctccctccttacagttcagcgacaagtttatccacgatgtcgctgttagcagcttcatccacggaacgttcgatgatcttctcggcgccagcaacagccaggatagcaacttgcttacgcagctcttcacgggcacgtttacgctcggcttcaatttccgcctgcgcctgggccacgattttagtacgttcctgttctgcctcagctttcgcttcgtccagaatctgcgagcggcgtttgttcgcctgctcgatgattacctgggcttccgctttcgcttttttcagctggtcggtcgcgctggcctttgcaaggtcaaggtccttatgtgctcgttctgcggaagcaaggccgtcagcaatttctttttgacgtttttcgatggctgccattaatggcggccatacgtacttcatgcagaacagaacgaacaggacaaacgcgatggcctggccgaggattgttgcgttaagattcacagcacaatgcctctatttagttaacgttctgatattgctctttaaataaaagcaacgcttactacgcgacagcgaacatcacgtacagacccagacctacagcgatcatcgggatagcatccaccagacccataacgataaagaactgagtacgcagcagaggaatcagatcaggttgacgcgctgcgccttccaggaatttacccccgaggatgccgataccgatcgcagcaccgattgccgccagacccatcatcacagcggcagccatgtacagcagatccatattcaggttttccatgacagtctccagtttgtttcagttaaaacgtagtagtgttggtaattaatgttcttcagacgccatcgacagatagacgatcgtcagaaccatgaagatgaaggcttgcagcgtaatgatcaggatgtggaaaatggcccacggcacattcaggatccactgtgaccaccacggcaacagaccagcaatcagaatgaaaatcagctcaccggcatacatgttaccgaacagtcgcaaaccgagtgaaactggtttggacagcaggcttaccccttcaaggattaagttgacaggaatgaacgcccagtgattgaacggctgcagcgtcaactctttcgtgaagccgccgatgcctttcattttgatgctgtagaacagaatcaggataaatacgcccagtgccatagacagcgttacgttcacgtccgcagacggaaccacacgcagtgcaggcagacccagtacatgttcagcaatgtacggcagcaggtcgataggcagtaaatccatcaggttcatcaggaatacccagacgaagatcgtcagggccagcggagcaatcagcttgcttttgccatggtacatgtctttcacgctaccattaacaaagccgatcaccagctcaatcgcggtctgaaacttacctggcacaccgctggtcgcctttttggctacgctacggaataaaaccaggaacaacagacccagcaccaccgagaagaacatggagtcaatattgattgtccagaaggtggctggggggttttgtggatccaccagcgagaatgtacgcaggtccagctgaaggttattcaggtggtgtcctatgtaatcctgcggcgtcatattttctgaagccatgatgccttttaccctttgttgttaattacagccggtgccagtatctgaaccaccagcaccaaaacccacgtaacgatcagcggcaagaataccgcctttaaaaccgccaacgccaccaccagtaacaccaacatcgccagaactttgaaagcttcgccaaatgcgaatgtccaggccacccggcctttcgctggtgtatgcgcctggtgacgccaggcaaatatcataaacaaaacgttaggcagaaagactgccaggcccccgcttattgcagagacgccccagaaggggtctttgaggctgaacagcaatccacttgctatcaccaccagtaactgaacgagcagaagcttccgagcaacgtttcgactcacgagcgacacagacatcacgtttttcactcctgctcccttcgaggtatgccgcgtgtcgtataaaactttctttaaggcttagagtcaagcatcaaaaagcggtcaaattatacggtgcgcccccgtgatttcaaacaataagtagccaaaaggtgaataaatgtttaaatatttttccagtgcatacaattgcgacttttctgctaaccctgttcgatcatgaaaaactgtaaataacgcgtaaacactggtgataaagcgtgcttcagatcacatattgcgcatgttcgcgcacagcatatttatttacttgatcgataggaatttaaatcccaaaaagattaaaaaaacacccaaaaacggatgtttattcgacactgcctgcgtgccatgagtgcaccgccatcaattaaatggatcttatcgagtgatactgtatatcactgatggttttttactccattcccctgaaaatggacgcaacttccccgatgcggctctcagccgcacacccgctgttgcgccagtggctcatgcatcaggaccagctctgtcagacggtagccccgcttcagccccgtaaaacgcatctgacatccgcacaggatgcactttagcgggtcaaccttcagtaaccgctgatacatccctctccacctgatttgcatcgccgtctttctcaccgtctccgttatgacgtacacaacatcttccagtaaccggcgctttaccggactcaggaaaccgtagtacctcaccatacggaaccccttatccgccacatgccaggagaacctttccataaactcatcaccactcatcaccaggtattcttcccgttttgtccggtgactgttgtaacgcagaccaatttcatcctgaccagcatagtgctccagacggctcatcggcaccggcggttttttcaggtaagagccgaagtacaccgccacatgtgtggcgttatccatcacccgggatacgttgacattccagccccgccggtaatgactgtccaggaagcgattccagtcccgtttactgcttccttctgctgccagcgcatccggtatcaccaggtccggatatttccgtgacagtaaccgcgttatccggtaacgccacatactcatcaccttacgggcgtaaaaatgaaggtttttccaggtgtggtctgatgtcacgccgccggtcgttgtcgacaggtgaatgtgcggatgccactgctggtcacgtccccatgtgtggatgaccgtgaatatccccggcaccacatctgcctggcggcagatttcctgtatcacatccgcagcaatgcggctcatctctgccagtaaccaccggttgtggaacaccagggaccagtactggcagggaagtgtgaacacaatatgctgccacggacagtcgggaaccagactcagcagatactgtatccactgtgcgccagccttcactccgcagtgcgggcaggagcgacttttacaccggaagcagatcttttttatgtggctgcagtccggagatgaacagcaccactgtgtgtaccccatcagcgtggtcccgcaggccatgatttttgtcacagactcaatgactaccggacgcactgaaccttccggttgtttctccagccagttaagccagcggtttccctgctgaaaaatgtcggcaaaacggggaagcatcagaagggcggggggactccgtccggccagtgaaccgtgccacactccgggcagtacatgccgccggcgctgataccggcaagaatggtcgcaaactcccgctccgtgcagcgggctatttcaggatacccttcgtcatcgacacgaacaaaccagaagaccagctttttgtttccggcatccacaaagaagggaatattcaggtctgcgcagcactcaacggcatcgtcaaaattatcaaagcgcagagcttctgcgtcttcttcgtcaaagaagtcatcgtcgtgaagcttcacgacatagcggggaagtttgcttctttgaggggcaggttttcgtttacggggtttagctgaacgggacatataactacctgaaagacaatgatattgtctgtttttataacggtaatttcaggccatgacaagccgcagccgccaggctgcctactcggcaaatgatgcctttgcaagtttatgatatttcagtctaaaaacagatactgttttaataaatgacatttacacaacaaaaaccacccattgacatttttaataatgttttaacagccaatgatggttcttagcgccgatttttagcagactgatattttcactaatgacttattttctgcttaccaaaaaaagccacgttatcttgttgatgcaaaagagtgaacgtggcgttaaatgtaaccagttatatcagtagaaaacctggttgttgttaacagtctaaccggtcaattttttatgatttttttgataaaaattaaattttatttgctttaatcaccaccagatgacgttcgccatccagggctggaacctgaagtttaaccactgattcgacctgatattcttcgggcaacaaagcgatttcatcttccggcatttgccctttcagcgcgtagaaacggccttgctcaccaggaagatggtggcaccagctcaccatatcgttcagagaggcaaaagcgcggctaattacgccatcaaatggcggctctgaaggaaactcttctaccctgctctgtactggttcaatattctccagtttaagctcatgttgcacctgacgaaggaaacgcacgcgtttaccaaggctatccaacagagtgaaatgggcttcaggacgcacgatagagagtggaatgcctggcagtcctggtccggtgccgacatcgataaaccgttcaccttgcagatacggtgccaccacaatgctatcgagaatatggcgtaccagcatctcattaggatcgcggaccgaagtcaggttgtacgctttgttccatttatgcagcatattcacgtaggcaataagctggtttttctggtgatcggtaagcgaaatacctgcgtctttcagcagtaaggagagtttgttgagcacggtgattacctgttcttgatgcgttgcctggtaagcgggtgcttaccaggcatttttaatgcgttatgcgctacgacgcagcataccctgttttttcagccacaccagcagaatggagatggccgcaggcgtgacgccagaaatacgcgaagcttggccgatagaggctggtttgtgatcgttaagtttggcgatcacttcgttagaaagaccggatacctggcggtaatccagtgtcgcgggtagcagggtgttctcgttacgcagctgcttttcgatctcatcttgctggcgcgcgatataaccttcgtatttaacctgaatctcaacctgttccgccgcctgttcgtctgtcaacgcaggggcaaacggcgtcagcgtggttaatttttcataagtcatttccggacgacgcagcagatcttcaccactggcttcacgggaaagcggcgcagtcaggtgagcattcacttcggctgcagcttccgccgacggggttacccaggtcgatttcagacgctgacgctcacgctcgatattctcaagtttctcgttaaagcgcgcccaacgttcgtcatccaccaggcccagttcacgaccgatttcagtcaaacgcagatccgcattatcttcgcgtagcatcagacgatattctgcgcgcgaagtaaacatacgatacggttctttggttcctaaagtgcacaggtcatcaactagtacgccgagatacgcctgagaacgtgccggagcccaaccttctttgtcagcagacagacgggcagcgttaagaccggccagcaaaccttgcgcagcggcttcttcgtaaccggtagtgccgttaatctgaccagcaaagaacagcccctggataaacttgctctccagcgtcggtttcaggtcgcgaggatcgaagaagtcatactcaatggcataacccggacgcacgatcttcgcgttttccatcccctgcatagagcggacgatttgcatctgcacatcgaacggcaggctggtggagataccgttcggataaatttcattagaggtcagtccttccggttcaaggaagatctgatgctgatttctgtcggcgaagcgcatgactttgtcttcgatcgacgggcagtagcgtgggccgacaccttcgatcacccctgcgtacattgggctacgatcgaggttactgcggatcacatcatgggttttctcgttggtatgagtgatataacacggcacctgctggggatgctgggacgcattgcccataaacgagaataccggcattgggttatcgccatgctgttgcgccagtacgctaaagtcgatggttcgagcatcaatacgcggtggtgtcccggttttcagacgaccaacgcgcagcggcagttcacgcaaacggcgagaaagcggaatggacggcggatcaccagcacggccaccgctgtaattatccagaccgatatgaattttaccgtcgaggaacgtcccaacggtgagcacgacggctttggcacggaacttcagtcccatttgggtaacagcaccgaccacgcgatcgttttcgacaataagatcttcaaccgcctgctggaagatcatcaggttcggttggttctccagcgccgtacgtaccgcctgacggtagagcacacgatccgcctgagctcgggtagcgcgaaccgccggtcctttgcttgcgtttagtatcctaaactggatacccgcctgatcgatcgctttcgccatcagaccgccgagtgcatccacttcttttaccagatgtcccttcccaataccgccgatcgccgggttgcagctcatctgccccagagtgtcgatattgtgtgtcaaaagcagagtctgttgacccatacgcgccgcggccatcgcggcctcggtgcctgcatgacccccgccaatgatgatgacgtcaaaaggatccggataaaacatggtgattgcctcgcataacgcggtatgaaaatggattgaagcccgggccgtggattctactcaactttgtcggcttgagaaagacctgggatcctgggtattaaaaagaagatctatttatttagagatctgttctattgtgatctcttattaggatcgcactgccctgtggataacaaggatccggcttttaagatcaacaacctggaaaggatcattaactgtgaatgatcggtgatcctggaccgtataagctgggatcagaatgaggggttatacacaactcaaaaactgaacaacagttgttctttggataactaccggttgatccaagcttcctgacagagttatccacagtagatcgcacgatctgtatacttatttgagtaaattaacccacgatcccagccattcttctgccggatcttccggaatgtcgtgatcaagaatgttgatcttcagtgtttcgcctgtctgttttgcaccggaatttttgagttctgcctcgagtttatcgatagccccacaaaaggtgtcatattcacgactgccaataccgattgcgccaaagcggactgcagaaagatcgggcttctgttcctgcaatgcttcatagaaaggagaaaggttgtccggaatatctccggcaccgtgggtggagctgataaccagccagatccctgaggcaggtaaatcttctaacagcggaccgtgcagcgtttcggtggtaaaacccgcctcttccagcttttcagccaggtgttctgctacatattcggcaccgccgagggtgctgccgctgataagagtgatatctgccataaaccgccacctttattaagagtggcgtattgtacgctgtgaacgcgttgggatctacctgtggaaaagtatgggattaaaaaagccgatcagggcttgatggtacgcatgatcgggttttgcaggacgatcaatgtctcggtggactgaatttcatcaattgtttggatcttgttgataagtacatgctggagagcgtcgatcgaacggcacatcacttttataaagatgctgtagtggccggttgtgtaataggcttcagtgacttcatcaaggctttccagctttgccagcgcggaagggtagtctttggcgctctttaatataatgccgataaagcagcctacgtcataaccgagctgcttcgggctgacatcaatacgcgccccggtaatgatccccgcctgcttcattttctctactcgaacgtgaatcgtccccggactgacgccaaattgtttcgccagttcggcgtaagcggtgcgcgcattgcccattaatgcttccaggatgccacggtccagattgtcgatcagataattttccatcggattttcttatgcggattgatgattcattctattttagccttcttttttaatgaatcaaaagtgagttaggctttttattgaatgattattgcatgtgtgtcggtttttgttgcttaatcataagcaacaggacgcaggagtataaaaaatgaaaaccgcttacattgccaaacaacgtcaaattagcttcgtgaaatctcacttttctcgtcaactggaagaacgtctggggctgatcgaagtccaggcgccgattcttagccgtgtgggggatggcacgcaggataacttgtcgggctgtgaaaaagcggtgcaggtaaaagtgaaagctctgcctgatgcccagttcgaagtggttcattcactggcgaagtggaaacgtcagaccttagggcaacacgacttcagcgcgggcgaagggctgtacacgcacatgaaagcccttcgccccgatgaagaccgtctttctccgttgcactcggtctatgttgaccagtgggactgggaacgcgtaatgggcgacggtgagcgtcaattctcgactctgaaaagcacggtagaggcgatctgggcgggaattaaagcaaccgaagctgcggttagcgaagagtttggcctggcaccgttcctgccggatcagatccacttcgtacacagccaggagttactgtctcgttatccggatcttgatgccaaagggcgtgagcgggcgatagcgaaagatcttggcgcggtattccttgtcgggattggcggcaagctgagcgatggtcatcgccacgacgtgcgcgcaccggattatgatgactggagcaccccgtcagagctgggccatgcgggtctgaacggcgatattctggtgtggaacccggtactggaagatgcgtttgagctttcctccatggggatccgtgtagatgccgacacgctgaagcatcaactggcgctgaccggtgacgaagatcgcctggagctggagtggcatcaggcgctgctgcgcggtgaaatgccgcagaccatcggcggcggtatcggccagtctcgtttgactatgctgctgctgcaactgccgcatatcggccaggttcagtgtggagtatggccagctgctgttcgcgagagcgtcccttctctgctgtaataatttatcgccgccagcgtctgagcaggcggcttcgcatcccggtatcaaagcgccagatatgatcgaaaatgcgcatgatgccgggtttgccgtgtgccgacatcgccacggcatgaaagcgatgctgatgtacccgctgcagctctttcactttactcgtcacgtcgtcaggcaaccgctgagcgataaaatcagaaatcaccaccgcatcggcatcaaaccattccctgctttgcaagcgttccataatggcgcgaaaacaactggcaagatcggtgccgccacgaaactgctggcttaaaaaacggattgcttgttcgatgccttgtgggcctgaaagctcataacggacgatctcggtggaaaatagcataatatagcagcgccggttttctgcgagagcaatgcgcatcaaggccaggcagaacgctttcgcacactgttcattaaagccgcccattgagccggaagtatccacacagacaataaacggcccgcgcggctgttcatcgtaatctttatgtaccaccggacgttcgatcactttttcacgccacgactcaccgtgcaggcgataggtgagcaactgtttttccaccagccgacggtaaaactcatactccagttccgttatccctagtgtcgccagttctggcggcaggagacgtaaaatatcatcgctttgttgcagaccatcaacctgctcaggaaccgtcgccggttcgcgcaccatggtgcggaaggtttccatctgcgcatcgttgcgcggtattgatttggcttcccgagaacgccccagctgctctgccaggcgtttcagttccggatgttcgttaagaaattcaccgtatttcacaatcaactgatagtcgccacgtttaagctgaccggcgctcatatcccacagacgaccagctgcagtattgttatctgcgagaatcggttcaagttgtccgctcagcgtcatgcgttcctgaacttcactcaacagttgttcgcgttcttcttctaatagctgttgatttaacgtcgttgcttgcacgatcagacttaaacgccaacgctggagaaaaagcgtgtgtaacgctgaagtgatcgtgctgttagcatcaaccaactgtcgggcttgttctgcccatggagaattcagacgatgcagtaagtccaggatctgtggtagctgcacaataaactgtggcgtggagaggagctggctttgctgatagcacatcacctcttcggtgagttccggcgggactcgggcatctttcagccgactgcgcagcgcttcacgccagcggggaacatcatcagtgattgccgccttcaggcgtgggaatttttcaaagaagaccgccagctgcggtgaggccagcagtgcgatgatcatctcttcgatcaatccctcttcgctgacggccagcatcacattaagcgtatccagcgttagcattgttgtgcctggcgaatctgtgcaccgacatcctgtaggctggcttcaatgcgacctaaccagtcgccagggataaacagacatttttgctgttcgctgaataaagcgtgttgcttgcgccagtcgctttcaagctcttccagttgttgttttatttcaccaggcagaccttcagccgatgaaccgggaagtgccagcgtactgccttgtaaacttacatcgcgaacgacaagatgttgggcgctatcaacttccagattcagtttctgggcaaagccgataccgttcagtttaccgcgaatttcaccacctttgctcagccactgttccagcgcgctacgctcaaaggagatatgaaccacttccatatcatgcagttttaacggtttttgcagcagtagagtcagagtggaagcagtaacgttaacaggaagttgatactgctgacgacggctgaaaatgccgcccagacgaattaccgttaaggctgttttatcgctttgttgctgctggagttgcaggtgacgttgcacaatcgcgccaaggcgagtcaacatcccttgctgttgccaggcgtgaccggtcatcaatacatcaatttgttgttgtatcaaattcaggctttgcgcgtcataccacaggcaatctttcagcaaaatgagatctaccggggcaacagcactgcgaccgctaaaaaaggcgctggcctgcaataatcggatcgcttttttccagcgacgatccgagacataaggcgcatccggtaatttatccagttgctggcgcagcataaaaatcagctcaaatacatgatcgggcagcgtaatttcaccaatctctttctgccagcgttcatattcttcatctgtgacctgcaaggcatcaggaaccggattgtcgttttcatcctgttgactggtcagcatggagcggaaattcgctttatcctgcactttatctaaccacagacgaatcagcatgcggtcatataacgcttccagactgctgtctgcttccggcagctcgttggaggccgccaccagcagacgcatcgggattttttctacgtgtgcaccgttgcggaactggcgctcgttaatggcggtgagcaaggtattaagaattgccgggcccgctttccagatctcatccagaaagacaatttctgcttccggcaggtaaccgctggttaaacgttcatagcgcccttcatcttttagcgcctgaatagaaaggggaccaaaaacttcttccggcgtggagaagcgggtcatcagatattcaaacgcgcgggcattctgaaaggcgaattttaagcgccgtgcgatcaaacttttggcaatacctggcgggccaaggaggaacacactttcaccacttaatgccgctaataaacacaagcggatggcgtggctacgttcataaagccccttttccaacgaactgctcaggcgggaaattctttccgctaataaatgagggtgagccataatgaagtggcgtcctttcgtcaaaagttctgcgtaaattgcgagtatagacgtttcttgctggtggctaaaatagtctcaaagggggggtatttttctttgagccaggttaatgtggccgcatttaggagtacgattttgccgttaatcgtgcatactgtgcgcttttttgtgggccaagggactaagcacacatttcatatttcaacgaaagactagtctatgagcactgataataagcaatcattgcccgcgattaccctcgcggcgattggagttgtctacggcgatattggtaccagcccgttatatacacttcgtgaatgtttgtccggccagtttggttttggcgttgaacgcgatgccgtgtttggctttttatcgctgatcttctggctgctaatctttgtggtttccattaaatatctcaccttcgtgatgcgggcagataacgccggtgagggggggatcctgacgttgatgtcgcttgccgggcgtaatacgtcggcgcgaaccacatcaatgctggtgattatggggctaatcggcggcagctttttctatggtgaagtcgtcataacacccgctatttcggtgatgtcagccattgaaggtctggaaatcgtcgccccgcagctggatacctggatagttcccctctcaattatcgttctcactttattatttatgattcaaaaacatggcacggctatggtcggtaagctgtttgcgccgatcatgctgacctggtttttgattctggcaggactggggttacgtagcattattgctaacccggaagtgctgcatgcgctgaatccaatgtgggcggtgcatttcttccttgaatacaaaacggtttcttttattgcattaggggcagtggtgttgtcgattacgggggtcgaggcgctgtatgctgatatggggcactttggtaagttccctattcgcctggcgtggttcaccgtcgtattaccttccttgacccttaattacttcggtcagggagcgctgttgttaaagaacccggaagcgattaagaacccgttcttcctgttggcaccggactgggcgctgatcccgctgctgatcatcgccgcactggcgacggtaattgcctcgcaggcggttatctctggcgtcttctcattgacgcgtcaggcggtacgtctgggatatttgtcgccgatgcgcattattcacacctccgaaatggagtcagggcaaatctatattccgtttgtgaactggatgctctatgtcgcggtcgtgattgtgattgtcagctttgagcactccagcaacctggcggcggcgtacgggattgcggtgaccggaaccatggtgctgacgtctattctctcgactaccgtggcacgtcagaactggcactggaataagtattttgttgcgctgatcctgattgctttcctttgtgtcgatattccattgttcaccgctaacctcgataaactgctctccggcggctggttgccattgagcctcggtactgtgatgtttatcgtgatgaccacctggaagagcgagcgtttccgcttgctgcggcggatgcatgaacatggtaactctctggaagcgatgattgcttcgctggagaaatcaccgcctgttcgcgtgcccgggaccgcggtgtatatgtcgcgtgcaatcaacgtcattccctttgcgctgatgcataaccttaaacataacaaggtattgcatgagcgggtgattctgttaactctgcgcaccgaagacgctccatatgtccataacgtccgtcgggtacagattgaacaactgtcgcccactttctggcgcgtggtggcaagttatggttggcgagaaacgccaaacgtagaagaagttttccaccgctgcggtctggaaggattaagttgccggatgatggaaacctccttctttatgtcgcatgagtcgttgatcctcggcaaacgcccgtggtatttgcgtctgcgcggcaagctgtacttgctgctgcaacgtaatgcgctgcgtgcaccagatcaatttgaaatcccgccaaacagggttatcgaactgggtactcaggtcgaaatctaacgccagacgcctcctttcttcataagggggcgtttttgttttcatggttaatcaccatgtaaaacgtttcgaggttgatcacatttccgtaacgtcacgatggttttcccaactcagtcaggattaaactgtgggtcagcgaaacgtttcgctgatggagaaaaaaatgaaaaaaggcaccgttcttaattctgatatttcatcggtgatctcccgtctgggacataccgatacgctggtggtgtgtgatgctggtttacccatccccaaaagtacaacgcgtatcgatatggcattaacccagggtgtaccttcttttatgcaggtgctgggcgtcgtcacaaatgaaatgcaagtcgaggcggccattatcgcggaagagatcaaacaccataatccgcaactccacgaaacgttgctcactcaccttgagcagctgcaaaaacaccagggaaataccattgaaattcgttacaccacgcatgaacaattcaaacaacaaaccgcagaaagtcaggcggtaattcgcagcggagaatgttctccgtatgcgaatatcattctctgtgctggcgtgacgttctgaggccgtcatggaagcattacttcagcttaaaggcatcgataaagccttcccgggcgtaaaagccctctcgggcgcagcgttaaatgtctatccgggccgcgtgatggcgctggtgggcgaaaacggcgcgggtaaatccaccatgatgaaagtgcttactggcatctatactcgcgatgccggtacgcttttatggctggggaaagaaacgacatttaccgggccaaaatcttcccaggaagccgggattgggattatccatcaggaactgaacctgatcccgcagttgaccattgccgaaaacattttcctcggtcgtgagtttgttaatcgctttggcaaaattgactggaaaaccatgtatgccgaagcggataaattgctggctaaacttaacctgcgctttaaaagcgacaagctggtgggcgatctttccatcggtgaccagcaaatggttgaaatcgccaaagtgctgagctttgagtcgaaagtcatcattatggatgaaccgaccgatgcgctgaccgataccgaaaccgaatccctgttccgcgtcatccgcgagctgaaatcgcaaggccgcggtattgtctatatctcccaccgcatgaaagaaatcttcgagatttgcgatgacgttaccgtttttcgtgatgggcaatttattgctgagcgcgaagtggcatcactgaccgaagattcgctgattgagatgatggtgggtcgcaagctggaagatcaatatccgcacctggacaaagcgccgggagatatccgcctgaaagtcgataatctctgcggacctggcgttaacgatgtctcttttactttacgcaaaggcgaaattcttggcgtctctggtttgatgggcgcaggtcgtaccgaactgatgaaaatgctctacggcgcactaccgcgcaccagcggttacgtcaccctggatgggcatgaagtcgttacccgttcaccgcaggatggcctggcaaacggcattgtgtatatctccgaagaccgtaaacgtgacggtttagtgttgggcatgtcagtaaaagagaacatgtcgctgacagcgctgcgctacttcagccgcgctggcggcagtttgaagcatgccgatgaacagcaggctgtgagtgatttcattcgtctgtttaatgtgaaaactccgtcgatggaacaggcaattggtctgctttccggtggcaatcagcaaaaagtggcgattgcccgcggtctgatgacacgccccaaagtgttgatccttgatgaacctacccgtggcgtagatgtcggcgcgaaaaaagagatctatcaactgattaaccagttcaaagccgatggcttgagcatcattctggtgtcatcggagatgccagaagtattaggcatgagcgatcgcatcatcgtcatgcatgaagggcatctcagcggggaatttactcgtgagcaggccacccaggaagtgttaatggctgccgctgtgggcaagcttaatcgcgtgaatcaggagtaaaaaaatgacaacccagactgtctctggtcgccgttatttcacgaaagcgtggctgatggagcagaaatcgcttatcgctctgctggtgctgatcgcgattgtctcgacgttaagcccgaactttttcaccatcaataacttattcaatattctccagcaaacctcagtgaacgccattatggcggtcgggatgacgctggtgatcctgacgtcgggcatcgacttatcggtaggttctctgttggcgctgaccggcgcagttgctgcatctatcgtcggcattgaagtcaatgcgctggtggctgtcgctgctgctctcgcgttaggtgccgcaattggtgcggtaaccggggtgattgtagcgaaaggtcgcgtccaggcgtttatcgctacgctggttatgatgcttttactgcgcggcgtgaccatggtttataccaacggtagcccagtgaataccggctttactgagaacgccgatctgtttggctggtttggtattggtcgtccgctgggcgtaccgacgccagtctggatcatggggattgtcttcctcgcggcctggtacatgctgcatcacacgcgtctggggcgttacatctacgcgctgggcggcaacgaagcggcaacgcgtctttctggtatcaacgtcaataaaatcaaaatcatcgtctattctctttgtggtctgctggcatcgctggccgggatcattgaagtggcgcgtctctcctccgcacaacccacggcggggactggctatgagctggatgctattgctgcggtggttctgggcggtacgagtctggcgggcggaaaaggtcgcattgttgggacgttgatcggcgcattaattcttggcttccttaataatggattgaatttgttaggtgtttcctcctattaccagatgatcgtcaaagcggtggtgattttgctggcggtgctggtagacaacaaaaagcagtaataacgactacaggacatcttgaatatgaacatgaaaaaactggctaccctggtttccgctgttgcgctaagcgccaccgtcagtgcgaatgcgatggcaaaagacaccatcgcgctggtggtctccacgcttaacaacccgttctttgtatcgctgaaagatggcgcgcagaaagaggcggataaacttggctataacctggtggtgctggactcccagaacaacccggcgaaagagctggcgaacgtgcaggacttaaccgttcgcggcacaaaaattctgctgattaacccgaccgactccgacgcagtgggtaatgctgtgaagatggctaaccaggcgaacatcccggttatcactcttgaccgccaggcaacgaaaggtgaagtggtgagccacattgcttctgataacgtactgggcggcaaaatcgctggtgattacatcgcgaagaaagcgggtgaaggtgccaaagttatcgagctgcaaggcattgctggtacatccgcagcccgtgaacgtggcgaaggcttccagcaggccgttgctgctcacaagtttaatgttcttgccagccagccagcagattttgatcgcactaaaggtttgaacgtaatgcagaacctgttgaccgctcatccggatgttcaggctgtattcgcgcagaatgatgaaatggcgctgggcgcgctgcgcgcactgcaaactgccggtaaatcggatgtgatggtcgtcggatttgacggtacaccggatggcgaaaaagcggtgaatgatggcaaactagcagcgactatcgctcagctacccgatcagattggcgcgaaaggcgtcgaaaccgcagataaagtgctgaaaggcgagaaagttcaggctaagtatccggttgatctgaaactggttgttaagcagtagttttaatcaggttgtatgacctgatggtgacataaatacgtcatcgacagatgaacgtgtaatataaagaaaagcagggcacgcgccaccctaacacggtggcgcattttatggacatcccgaatatgcaaaacgcaggcagcctcgttgttcttggcagcattaatgctgaccacattcttaatcttcaatcttttcctactccaggcgaaaccgtaaccggtaaccactatcaggttgcatttggcggcaaaggcgcgaatcaggctgtggctgctgggcgtagcggtgcgaatatcgcgtttattgcctgtacgggtgatgacagcattggtgagagcgttcgccagcagctcgccactgataacattgatattactccggtcagcgtgatcaaaggcgaatcaacaggtgtggcgctgatttttgttaatggcgaaggtgagaatgtcatcggtattcatgccggcgctaatgctgccctttccccggcgctggtggaagcgcaacgtgagcgtattgccaacgcgtcagcattattaatgcagctggaatcaccactcgaaagtgtgatggcagcggcgaaaatcgcccatcaaaataagactatcgttgcgcttaacccggctccggctcgcgaacttcctgacgaactgctggcgctggtggacattattacgccaaacgaaacggaagcagaaaagctcaccggtattcgtgttgaaaatgatgaagatgcagcgaaggcggcgcaggtactgcatgaaaaaggtatccgtactgtactgattactttaggaagtcgtggtgtatgggctagcgtgaatggtgaaggtcagcgcgttcctggattccgggtgcaggctgtcgataccattgctgccggagatacctttaacggtgcgttaatcacggcattgctggaagaaaaaccattgccagaggcgattcgttttgcccatgctgccgctgcgattgccgtaacacgtaaaggcgcacaaccttccgtaccgtggcgtgaagagatcgacgcatttttagacaggcagaggtgacgcttggctacaatgaaagatgttgcccgcctggcgggcgtttctacctcaacagtttctcacgttatcaataaagatcgcttcgtcagtgaagcgattaccgccaaagttgaagcggcgattaaagaactcaattacgcgccatcagctctggcgcgtagcctcaaactcaatcaaacacataccattggcatgttgatcactgccagtaccaatcctttctattcagaactggtgcgtggcgttgaacgcagctgcttcgaacgcggttatagtctcgtcctttgcaataccgaaggcgatgaacagcggatgaatcgcaatctggaaacgctgatgcaaaaacgcgttgatggcttgctgttactgtgcaccgaaacgcatcaaccttcgcgtgaaatcatgcaacgttatccgacagtgcctactgtgatgatggactgggctccgttcgatggcgacagcgatcttattcaggataactcgttgctgggcggagacttagcaacgcaatatctgatcgataaaggtcatacccgtatcgcctgtattaccggcccgctggataaaactccggcgcgcctgcggttggaaggttatcgggcggcgatgaaacgtgcgggtctcaacattcctgatggctatgaagtcactggtgattttgaatttaacggcgggtttgacgctatgcgccaactgctatcacatccgctgcgtcctcaggccgtctttaccggaaatgacgctatggctgttggcgtttaccaggcgttatatcaggcagagttacaggttccgcaggatatcgcggtgattggctatgacgatatcgaactggcaagctttatgacgccaccattaaccactatccaccaaccgaaagatgaactgggggagctggcgattgatgtactcatccatcggataacccagccgacccttcagcaacaacgattacaacttactccgattctgatggaacgcggttcggcttagatttacgctgtcttttgatcaaattattaccatcggttgttttcagaagcatgaacattgctgctgaagcaacagtaataatgcccattgtgataaacgtatagtggaattgttcgacagtcgttgtgccttccattccttcataaacgcgaaggacggccgcacttacagcaacgcctaaactaatcgacagttgctgcgtgaccgccagaacactgttaccgctgctggcattgtcatcggtcagatcggcaagtgtgatggtattcatcgcggtaaactgcgtcgacatagccatccctaatataaacaacggcaagatcagcatccatatagccattgctggtgattgcaaagagaactgagcgatcattagcccaataatcaccgtgatccccactaacgtatggcgatagcccagacgacgtaagacttgggtaaccatcgattttgcaataatggaacctaacgctgtcggtgccatcatacagccagcaataaacgcctgataaccaaatcctacctgtaacatcaatggcataaggaacggtacacagccggtccccagacgggttgcaatattgcctacgataccgatcgagaaagtgcgggttttaaataaatctaatgaaattaatgggtttggcgtgcgtcgtgcatggagaatatagagaagcagtaacccgatgctggtgacaattaccgtcaaggcaatccagctggcgacaatcttttccccgaatagctctattccgcttgagaagagaacaaggctgaggccaaacagcaaaaagccagtgatatcgaatctgcgtcgtgcggtggtgaaattgggcatatgtttgcgcgcgtaaagaaggcccgcaatacctatggggatattgattaaaaatatccagtgccaggttgcccaggtgaccagcacgccgccaagaacggggcctaaaattggccccaccagacccggcatggcgacaaaattcaatactggaagaagttcattacgaggataagcgcgcagtaaggccagccgagcaacaggcatcatcattgcgccgcctatcccctgaataacccggaagacaaccagctgtggtagcgaattagaaagtgcgcaggccagagaacccaatgtgaacagactcacggcaagggtaaaaatgcgacgcgtaccgaagcgatcggctagccatccgcttaccggaataagcatcgccaccgtcagcgtataactgatgatggctgattgcatcgcgagaggagaacgattaaggctatgagcgattgcgggtaaggcggtattaagaatagtggcatcaagtgcctgcatgaagaaggccatcgccgcgatccacggcaaacccgccatactgcgcttctttttatcgctcattcaatgtcctgttatcgggttatcacttatcaggtgagcgtagcagcgcctgacaagctttaaatgccgcgtcgccatcgctttggataatcgcatcgacaatcgcctgatgcagatccagctttatcactgtgtcgctggtaattgacgtgaagtaagtgtgataaaccgaatggaatagcgaggcgaatgaggtcaaaaacggattggcgctcatttcatagatatgctcatgccaggccatatcgacttcgatccagcgttcacggcgaaagttctcttttaatgccgccatttcggccattaacgtattgagatgcgctttctgttccgcggtgccaaccgttgctgccagtaggcaggcttgcggctccagacagatacgcataaccagaaagtgatcgatgacctgatgaaagttctcttctgtcatccaccaggtaagcaattcctgatcaagaaaattccagttcgattgtggcatgacccgagtaccaattcgcggtcgcggtaaaaccatcccttttgccgttaacgttttgaccgcttcgcgtaccgctgtacgactcactccaaattgctcgcccagctcaatctcaccgggcaaaatggtgccgggttcatattcaccttttaagatccgttgcgccagcttctcagccagaacatacgaaaggtttttctgtgcagctaactgttgtgcgcttaaaggcattacttatcttcctttttctttttattcctccttagtatgccaccaggaagtgtgattacggttgcaaaaacggcaaattgcttgttttatggcacattaacggggcttttgctgaaaaaatgcgcggtcagaaaattattttaaatttcctcttgtcaggccggaataactccctataatgcgccaccactgacacggaacaacggcaaacacgccgccgggtcagcggggttctcctgagaactccggcagagaaagcaaaaataaatgcttgactctgtagcgggaaagtgtattatgcacaccccgcgccgctgagaaaaagcaaagcggcacagctctttaacaatttatcagacaatctgtgtgggcactcgaagatacggattcttaacgtcgcaagacgaaaaatgaataccaagtctcaagagtgaacacgtaattcattacgaagtttaattctttgagcatcaaacttttaaattgaagagtttgatcatggctcagattgaacgctggcggcaggcctaacacatgcaagtcgaacggtaacaggaagaagcttgcttctttgctgacgagtggcggacgggtgagtaatgtctgggaaactgcctgatggagggggataactactggaaacggtagctaataccgcataacgtcgcaagaccaaagagggggaccttcgggcctcttgccatcggatgtgcccagatgggattagctagtaggtggggtaacggctcacctaggcgacgatccctagctggtctgagaggatgaccagccacactggaactgagacacggtccagactcctacgggaggcagcagtggggaatattgcacaatgggcgcaagcctgatgcagccatgccgcgtgtatgaagaaggccttcgggttgtaaagtactttcagcggggaggaagggagtaaagttaatacctttgctcattgacgttacccgcagaagaagcaccggctaactccgtgccagcagccgcggtaatacggagggtgcaagcgttaatcggaattactgggcgtaaagcgcacgcaggcggtttgttaagtcagatgtgaaatccccgggctcaacctgggaactgcatctgatactggcaagcttgagtctcgtagaggggggtagaattccaggtgtagcggtgaaatgcgtagagatctggaggaataccggtggcgaaggcggccccctggacgaagactgacgctcaggtgcgaaagcgtggggagcaaacaggattagataccctggtagtccacgccgtaaacgatgtcgacttggaggttgtgcccttgaggcgtggcttccggagctaacgcgttaagtcgaccgcctggggagtacggccgcaaggttaaaactcaaatgaattgacgggggcccgcacaagcggtggagcatgtggtttaattcgatgcaacgcgaagaaccttacctggtcttgacatccacggaagttttcagagatgagaatgtgccttcgggaaccgtgagacaggtgctgcatggctgtcgtcagctcgtgttgtgaaatgttgggttaagtcccgcaacgagcgcaacccttatcctttgttgccagcggtccggccgggaactcaaaggagactgccagtgataaactggaggaaggtggggatgacgtcaagtcatcatggcccttacgaccagggctacacacgtgctacaatggcgcatacaaagagaagcgacctcgcgagagcaagcggacctcataaagtgcgtcgtagtccggattggagtctgcaactcgactccatgaagtcggaatcgctagtaatcgtggatcagaatgccacggtgaatacgttcccgggccttgtacacaccgcccgtcacaccatgggagtgggttgcaaaagaagtaggtagcttaaccttcgggagggcgcttaccactttgtgattcatgactggggtgaagtcgtaacaaggtaaccgtaggggaacctgcggttggatcacctccttaccttaaagaagcgttctttgcagtgctcacacagattgtctgataggaagtgaaaagcaaggcgtcttgcgaagcagactgatacgtccccttcgtctagaggcccaggacaccgccctttcacggcggtaacaggggttcgaatcccctaggggacgccacttgctggtttgtgagtgaaagtcacctgccttaatatctcaaaactcatcttcgggtgatgtttgagatatttgctctttaaaaatctggatcaagctgaaaattgaaacactgaacaacgaaagttgttcgtgagtctctcaaattttcgcaacacgatgatgaatcgaaagaaacatcttcgggttgtgaggttaagcgactaagcgtacacggtggatgccctggcagtcagaggcgatgaaggacgtgctaatctgcgataagcgtcggtaaggtgatatgaaccgttataaccggcgatttccgaatggggaaacccagtgtgtttcgacacactatcattaactgaatccataggttaatgaggcgaaccgggggaactgaaacatctaagtaccccgaggaaaagaaatcaaccgagattcccccagtagcggcgagcgaacggggagcagcccagagcctgaatcagtatgtgtgttagtggaagcgtctggaaaggcgcgcgatacagggtgacagccccgtacacaaaaatgcacatgctgtgagctcgatgagtagggcgggacacgtggtatcctgtctgaatatggggggaccatcctccaaggctaaatactcctgactgaccgatagtgaaccagtaccgtgagggaaaggcgaaaagaaccccggcgaggggagtgaaaaagaacctgaaaccgtgtacgtacaagcagtgggagcacgcttaggcgtgtgactgcgtaccttttgtataatgggtcagcgacttatattctgtagcaaggttaaccgaataggggagccgaagggaaaccgagtcttaactgggcgttaagttgcagggtatagacccgaaacccggtgatctagccatgggcaggttgaaggttgggtaacactaactggaggaccgaaccgactaatgttgaaaaattagcggatgacttgtggctgggggtgaaaggccaatcaaaccgggagatagctggttctccccgaaagctatttaggtagcgcctcgtgaattcatctccgggggtagagcactgtttcggcaagggggtcatcccgacttaccaacccgatgcaaactgcgaataccggagaatgttatcacgggagacacacggcgggtgctaacgtccgtcgtgaagagggaaacaacccagaccgccagctaaggtcccaaagtcatggttaagtgggaaacgatgtgggaaggcccagacagccaggatgttggcttagaagcagccatcatttaaagaaagcgtaatagctcactggtcgagtcggcctgcgcggaagatgtaacggggctaaaccatgcaccgaagctgcggcagcgacactatgtgttgttgggtaggggagcgttctgtaagcctgtgaaggtgtgctgtgaggcatgctggaggtatcagaagtgcgaatgctgacataagtaacgataaagcgggtgaaaagcccgctcgccggaagaccaagggttcctgtccaacgttaatcggggcagggtgagtcgacccctaaggcgaggccgaaaggcgtagtcgatgggaaacaggttaatattcctgtacttggtgttactgcgaaggggggacggagaaggctatgttggccgggcgacggttgtcccggtttaagcgtgtaggctggttttccaggcaaatccggaaaatcaaggctgaggcgtgatgacgaggcactacggtgctgaagcaacaaatgccctgcttccaggaaaagcctctaagcatcaggtaacatcaaatcgtaccccaaaccgacacaggtggtcaggtagagaataccaaggcgcttgagagaactcgggtgaaggaactaggcaaaatggtgccgtaacttcgggagaaggcacgctgatatgtaggtgaagtccctcgcggatggagctgaaatcagtcgaagataccagctggctgcaactgtttattaaaaacacagcactgtgcaaacacgaaagtggacgtatacggtgtgacgcctgcccggtgccggaaggttaattgatggggttagcgcaagcgaagctcttgatcgaagccccggtaaacggcggccgtaactataacggtcctaaggtagcgaaattccttgtcgggtaagttccgacctgcacgaatggcgtaatgatggccaggctgtctccacccgagactcagtgaaattgaactcgctgtgaagatgcagtgtacccgcggcaagacggaaagaccccgtgaacctttactatagcttgacactgaacattgagccttgatgtgtaggataggtgggaggcttagaagtgtggacgccagtctgcatggagccgaccttgaaataccaccctttaatgtttgatgttctaacgttgacccgtaatccgggttgcggacagtgtctggtgggtagtttgactggggcggtctcctcctaaagagtaacggaggagcacgaaggttggctaatcctggtcggacatcaggaggttagtgcaatggcataagccagcttgactgcgagcgtgacggcgcgagcaggtgcgaaagcaggtcatagtgatccggtggttctgaatggaagggccatcgctcaacggataaaaggtactccggggataacaggctgataccgcccaagagttcatatcgacggcggtgtttggcacctcgatgtcggctcatcacatcctggggctgaagtaggtcccaagggtatggctgttcgccatttaaagtggtacgcgagctgggtttagaacgtcgtgagacagttcggtccctatctgccgtgggcgctggagaactgaggggggctgctcctagtacgagaggaccggagtggacgcatcactggtgttcgggttgtcatgccaatggcactgcccggtagctaaatgcggaagagataagtgctgaaagcatctaagcacgaaacttgccccgagatgagttctccctgaccctttaagggtcctgaaggaacgttgaagacgacgacgttgataggccgggtgtgtaagcgcagcgatgcgttgagctaaccggtactaatgaaccgtgaggcttaaccttacaacgccgaagctgttttggcggatgagagaagattttcagcctgatacagattaaatcagaacgcagaagcggtctgataaaacagaatttgcctggcggcagtagcgcggtggtcccacctgaccccatgccgaactcagaagtgaaacgccgtagcgccgatggtagtgtggggtctccccatgcgagagtagggaactgccaggcatcaaattaagcagtaagccggtcataaaaccggtggttgtaaaagaattcggtggagcggtagttcagtcggttagaatacctgcctgtcacgcagggggtcgcgggttcgagtcccgtccgttccgccaccctaattaggggcgtagttcaattggtagagcaccggtctccaaaaccgggtgttgggagttcgagtctctccgcccctgccagaaatcatccttagcgaaagctaaggattttttttatctgaaataaccctctccgaagtaaatccttctaccggcatccttgccagccattcatattaatacacttcatccagcacgttaattttcaaaagatcgcgaatcaacgcatttttatcgctattttgcagccatatggcataaagcggccgtgaaagtgttgtgctatcgacaacggtatgcaggccgccttttttacgcgcccagctgacgggtagccaggtgcaaccattaagcatcgcaatctgttgctgtgccagttcagcagaactggttgtcagaatgggcacttcgtcagcaccgatcaaacctgcctcatgctgttgaaaatctggcccccactcaagtcgcagataattaagatctccctttagttttgaaggggcactggtataaagcgctaaagtgaaatatcccagcaactgactactaaattcgtccattttgggcgcttcagtggtaataagaagatcaagctggcgttcatgcagctgttttaccagagactgccgttgggcaattcgcgcttcgaactgtaagcctgtatgggcatcctgattttgatacaagcgtcccagccactgattaagcatacattcccacaacgaggcgctggcaccgatagaaaactcgttatgtcgtgaggtatgcgccacctccttacgggcggcctgccaggtgctcatgagcgtttctgcataaggcagtagtttttcaccggcagcggttaaacggatattgtttctgtggcgggtgaaaaggttcacacccagttgattttccagttgtctgattcgaaagctcactgctgactgggtcagatagagcgattcagccgctcgaccaaagtgacgcgttcggctaacttccaggaaagtttttaacaattccgtatccacagtgctctccgcaaaattatttgtcgttatgatttaaatgttttgttttacactctgtcaagcgtaactaatactccgcgccataactagctcggtcaaagaattaggagcgtgcaggatggcggaaagctttacgacgactaatcgatatttcgacaataaacattatccacgtggattctctcgtcatggtgatttcaccatcaaagaggcacaactgcttgagcgtcatggttatgccttcaatgagttggatcttggcaaacgcgagccggttaccgaggaagagaaactcttcgtagcagtatgccgtggcgaacgtgagccagtgacagaagcagaacgcgtgtggtccaagtatatgacgcgtattaagcgtccaaaacgttttcacaccctttccggcggtaaaccgcaggttgaaggtgctgaagactacaccgattctgacgattaataaaaagggcgaaatgccctttttttatgtcagtagtttctgcagatggatgagcaaacggtcaatcgctcgatagctaactgcctcctgcaaatgctgacgtgtgataatgtcagactgatcaatatcagcaatggttcgtgcaactttcaataacctctgccaggcacgaatcgataaccccagatggatcagtgttccttccaaccacatcgcatcttcgctctcaagtttgcagaattggcgtatttccggactatccagccaggcattcagtttattctgccgcttaaattggcgctctctggcggccattacgcgttgtttaacggtggcgctgctttctcccggcactaccgttttactcaaaatgccggggggtggtaatgggatctccagtgagagatcgaagcggtcgagaaagggccccgagagccggttgagataacgtaatgtctgttctggcgtgcagcggttatggtttccctgataatgtccggtagggctgggattcatcgccgcaacaagctggaaacgggctggataggttatttttgctcgtgtgcgtgaaagatggatctgcccggattcaatcggctctcgcaaggcatccagtgtacgccgttcaaattcaggtagctcatcaagaaaaagcacgccgttatgcgccagcgaaatttcaccgggccctggaattgcgccaccgcctaccatcgcagttaacgatgcactgtgatgaggtgagcggaacgggcgctgccgccattgtttttgtactgattcagcatttaccagacttaatatcgcagcactctccagtgcctcttcattgcttaaatctggcaacaggccattaatacggctggcgagcattgttttacctgttcccggcggcccaatcagtaaaaggttgtgcccgccagcagcggtaatttccagtcctcgctttccttgttcctgaccgataacatcactgagatcatgttgtagcgcccgggatactgcatcagttggtttcgggcgttcgagagcgtgcttaccttccagaaacgcacagacagcttgcagatgatcggctatcaggcatccttcaccgttaattagccccacttcatcttcgttatctttcgcgacgataatttttctgcccgacttaatagcttcagttgcactggagattgcgccgggaacgccacgcagagcgcctgtaagcgccagttctccgactaattcatattcatctaacttattggctgtaagctgttctgaggccgccagcaacgcaatggcgataggtaaatcatatcgtcccccttcttttggcagatcagctggagccaggttgatggtgatttttttcgccggatattcatatccgctattgataatggcgctgcgcacgcgatcgcgagcttcttttaccgttgtttctggtaagcccaccatcgttaagccgggtagacctttactgatatgtacctcaacagtgatcgggggcgcatttactcccagggctgcgcgggtatgaacaattgacagtgacataagccctccttgagtcaccattatgtgcataagatatcgctgctgtagcccgctaattcgtgaattttagtggctgattcctgtttatttgtgcaagtgaagttgagttgttctggcggtggaatgatgctcgcaaaaatgcagcggacaaaggatgaactacgaggaagggaacaacattcatactgaaattgaatttttttcactcactattttatttttaaaaaacaacaatttatattgaaattattaaacgcatcataaaaatcggccaaaaaatatcttgtactatttacaaaacctatggtaactctttaggcattccttcgaacaagatgcaagaaaagacaaaatgacagcccttctacgagtgattagcctggtcgtgattagcgtggtggtgattattatcccaccgtgcggggctgcacttggacgaggaaaggcttagagatcaagccttaacgaactaagacccccgcaccgaaaggtccgggggttttttttgaccttaaaaacataaccgaggagcagacaatgaataacagcacaaaattctgtttctcaagattcaggacggggaactaactatgaatggcgcacagtgggtggtacatgcgttgcgggcacagggtgtgaacaccgttttcggttatccgggtggcgcaattatgccggtttacgatgcattgtatgacggcggcgtggagcacttgctatgccgacatgagcagggtgcggcaatggcggctatcggttatgctcgtgctaccggcaaaactggcgtatgtatcgccacgtctggtccgggcgcaaccaacctgataaccgggcttgcggacgcactgttagattccatccctgttgttgccatcaccggtcaagtgtccgcaccgtttatcggcactgacgcatttcaggaagtggatgtcctgggattgtcgttagcctgtaccaagcacagctttctggtgcagtcgctggaagagttgccgcgcatcatggctgaagcattcgacgttgcctgctcaggtcgtcctggtccggttctggtcgatatcccaaaagatatccagttagccagcggtgacctggaaccgtggttcaccaccgttgaaaacgaagtgactttcccacatgccgaagttgagcaagcgcgccagatgctggcaaaagcgcaaaaaccgatgctgtacgttggcggtggcgtgggtatggcgcaggcagttccggctttgcgtgaatttctcgctgccacaaaaatgcctgccacttgtacgctgaaagggctgggcgcagtagaagcagattatccgtactatctgggcatgctggggatgcacggcaccaaagcggcaaacttcgcggtgcaggagtgtgacctgctgatcgccgtgggcgcacgttttgatgaccgggtgaccggcaaactgaacaccttcgcgccacacgccagtgttatccatatggatatcgacccggcagaaatgaacaagctgcgtcaggcacatgtggcattacaaggtgatttaaatgctctgttaccagcattacagcagccgttaaatatcaatgactggcagcaacactgcgcgcagctgcgtgatgaacattcctggcgttacgaccatcccggtgacgctatctacgcgccgttgttgttaaaacaactgtcggatcgtaaacctgcggattgcgtcgtgaccacagatgtggggcagcaccagatgtgggctgcgcagcacatcgcccacactcgcccggaaaatttcatcacctccagcggtttaggtaccatgggttttggtttaccggcggcggttggcgcacaagtcgcgcgaccgaacgataccgttgtctgtatctccggtgacggctctttcatgatgaatgtgcaagagctgggcaccgtaaaacgcaagcagttaccgttgaaaatcgtcttactcgataaccaacggttagggatggttcgacaatggcagcaactgttttttcaggaacgatacagcgaaaccacccttactgataaccccgatttcctcatgttagccagcgccttcggcatccatggccaacacatcacccggaaagaccaggttgaagcggcactcgacaccatgctgaacagtgatgggccatacctgcttcatgtctcaatcgacgaacttgagaacgtctggccgctggtgccgcctggcgccagtaattcagaaatgttggagaaattatcatgatgcaacatcaggtcaatgtatcggctcgcttcaatccagaaaccttagaacgtgttttacgcgtggtgcgtcatcgtggtttccacgtctgctcaatgaatatggccgccgccagcgatgcacaaaatataaatatcgaattgaccgttgccagcccacggtcggtcgacttactgtttagtcagttaaataaactggtggacgtcgcacacgttgccatctgccagagcacaaccacatcacaacaaatccgcgcctgagcgcaaaaggaatataaaaatgaccacgaagaaagctgattacatttggttcaatggggagatggttcgctgggaagacgcgaaggtgcatgtgatgtcgcacgcgctgcactatggcacttcggtttttgaaggcatccgttgctacgactcgcacaaaggaccggttgtattccgccatcgtgagcatatgcagcgtctgcatgactccgccaaaatctatcgcttcccggtttcgcagagcattgatgagctgatggaagcttgtcgtgacgtgatccgcaaaaacaatctcaccagcgcctatatccgtccgctgatcttcgtcggtgatgttggcatgggagtaaacccgccagcgggatactcaaccgacgtgattatcgctgctttcccgtggggagcgtatctgggcgcagaagcgctggagcaggggatcgatgcgatggtttcctcctggaaccgcgcagcaccaaacaccatcccgacggcggcaaaagccggtggtaactacctctcttccctgctggtgggtagcgaagcgcgccgccacggttatcaggaaggtatcgcgctggatgtgaacggttatatctctgaaggcgcaggcgaaaacctgtttgaagtgaaagatggtgtgctgttcaccccaccgttcacctcctccgcgctgccgggtattacccgtgatgccatcatcaaactggcgaaagagctgggaattgaagtacgtgagcaggtgctgtcgcgcgaatccctgtacctggcggatgaagtgtttatgtccggtacggcggcagaaatcacgccagtgcgcagcgtagacggtattcaggttggcgaaggccgttgtggcccggttaccaaacgcattcagcaagccttcttcggcctcttcactggcgaaaccgaagataaatggggctggttagatcaagttaatcaataaatacaaaaaatgggacggcacgcaccgtcccatttacgagacagacactgggagtaaataaagtatgcctaagtaccgttccgccaccaccactcatggtcgtaatatggcgggtgctcgtgcgctgtggcgcgccaccggaatgaccgacgccgatttcggtaagccgattatcgcggttgtgaactcgttcacccaatttgtaccgggtcacgtccatctgcgcgatctcggtaaactggtcgccgaacaaattgaagcggctggcggcgttgccaaagagttcaacaccattgcggtggatgatgggattgccatgggccacggggggatgctttattcactgccatctcgcgaactgatcgctgattccgttgagtatatggtcaacgcccactgcgccgacgccatggtctgcatctctaactgcgacaaaatcaccccggggatgctgatggcttccctgcgcctgaatattccggtgatctttgtttccggcggcccgatggaggccgggaaaaccaaactttccgatcagatcatcaagctcgatctggttgatgcgatgatccagggcgcagacccgaaagtatctgactcccagagcgatcaggttgaacgttccgcgtgtccgacctgcggttcctgctccgggatgtttaccgctaactcaatgaactgcctgaccgaagcgctgggcctgtcgcagccgggcaacggctcgctgctggcaacccacgccgaccgtaagcagctgttccttaatgctggtaaacgcattgttgaattgaccaaacgttattacgagcaaaacgacgaaagtgcactgccgcgtaatatcgccagtaaggcggcgtttgaaaacgccatgacgctggatatcgcgatgggtggatcgactaacaccgtacttcacctgctggcggcggcgcaggaagcggaaatcgacttcaccatgagtgatatcgataagctttcccgcaaggttccacagctgtgtaaagttgcgccgagcacccagaaataccatatggaagatgttcaccgtgctggtggtgttatcggtattctcggcgaactggatcgcgcggggttactgaaccgtgatgtgaaaaacgtacttggcctgacgttgccgcaaacgctggaacaatacgacgttatgctgacccaggatgacgcggtaaaaaatatgttccgcgcaggtcctgcaggcattcgtaccacacaggcattctcgcaagattgccgttgggatacgctggacgacgatcgcgccaatggctgtatccgctcgctggaacacgcctacagcaaagacggcggcctggcggtgctctacggtaactttgcggaaaacggctgcatcgtgaaaacggcaggcgtcgatgacagcatcctcaaattcaccggcccggcgaaagtgtacgaaagccaggacgatgcggtagaagcgattctcggcggtaaagttgtcgccggagatgtggtagtaattcgctatgaaggcccgaaaggcggtccggggatgcaggaaatgctctacccaaccagcttcctgaaatcaatgggtctcggcaaagcctgtgcgctgatcaccgacggtcgtttctctggtggcacctctggtctttccatcggccacgtctcaccggaagcggcaagcggcggcagcattggcctgattgaagatggtgacctgatcgctatcgacatcccgaaccgtggcattcagttacaggtaagcgatgccgaactggcggcgcgtcgtgaagcgcaggacgctcgaggtgacaaagcctggacgccgaaaaatcgtgaacgtcaggtctcctttgccctgcgtgcttatgccagcctggcaaccagcgccgacaaaggcgcggtgcgcgataaatcgaaactggggggttaataatggctgactcgcaacccctgtccggtgctccggaaggtgccgaatatttaagagcagtgctgcgcgcgccggtttacgaggcggcgcaggttacgccgctacaaaaaatggaaaaactgtcgtcgcgtcttgataacgtcattctggtgaagcgcgaagatcgccagccagtgcacagctttaagctgcgcggcgcatacgccatgatggcgggcctgacggaagaacagaaagcgcacggcgtgatcactgcttctgcgggtaaccacgcgcagggcgtcgcgttttcttctgcgcggttaggcgtgaaggccctgatcgttatgccaaccgccaccgccgacatcaaagtcgacgcggtgcgcggcttcggcggcgaagtgctgctccacggcgcgaactttgatgaagcgaaagccaaagcgatcgaactgtcacagcagcaggggttcacctgggtgccgccgttcgaccatccgatggtgattgccgggcaaggcacgctggcgctggaactgctccagcaggacgcccatctcgaccgcgtatttgtgccagtcggcggcggcggtctggctgctggcgtggcggtgctgatcaaacaactgatgccgcaaatcaaagtgatcgccgtagaagcggaagactccgcctgcctgaaagcagcgctggatgcgggtcatccggttgatctgccgcgcgtagggctatttgctgaaggcgtagcggtaaaacgcatcggtgacgaaaccttccgtttatgccaggagtatctcgacgacatcatcaccgtcgatagcgatgcgatctgtgcggcgatgaaggatttattcgaagatgtgcgcgcggtggcggaaccctctggcgcgctggcgctggcgggaatgaaaaaatatatcgccctgcacaacattcgcggcgaacggctggcgcatattctttccggtgccaacgtgaacttccacggcctgcgctacgtctcagaacgctgcgaactgggcgaacagcgtgaagcgttgttggcggtgaccattccggaagaaaaaggcagcttcctcaaattctgccaactgcttggcgggcgttcggtcaccgagttcaactaccgttttgccgatgccaaaaacgcctgcatctttgtcggtgtgcgcctgagccgcggcctcgaagagcgcaaagaaattttgcagatgctcaacgacggcggctacagcgtggttgatctctccgacgacgaaatggcgaagctacacgtgcgctatatggtcggcggacgtccatcgcatccgttgcaggaacgcctctacagcttcgaattcccggaatcaccgggcgcgctgctgcgcttcctcaacacgctgggtacgtactggaacatttctttgttccactatcgcagccatggcaccgactacgggcgcgtactggcggcgttcgaacttggcgaccatgaaccggatttcgaaacccggctgaatgagctgggctacgattgccacgacgaaaccaataacccggcgttcaggttctttttggcgggttagggaaaaatgcctgatagcgcttcgcttatcaggcctacccgcgcgacaacgtcatttgtggttcggcaaaatcttccagaatgcctcaattagcggctcatgtagccgctttttctgcgcacacacgcccagctcaaacggcgttttctcatcgctgcgctctaaaatcatcacgcggttacgcaccggttcggggctgttttccagcaccacttccggcaacaatgccacgccacagccgagtgccaccatcgataccatcgcttcatgcccgccaaccgtggcgtaaatcatcgggttactgattttattgcgtcgaaaccacagttcaatgcggcggcgtaccggcccctgatcggccataataaacggcaccgttgaccagtccggcttctctaccgacacctgattacgcaccgggcagggcagcgcgggggcaatcagcactactgccagattctccagcatcgaaaacgccactgcgccgggcaaggtttccggtttacccgcaatcgccagatccgcttcaccagtgaccaccttttccatcgcatctgccgcatcaccagtagtaagtttaatctccaccgacgggtgttccgcgcggaagcgatccagaatcggcggcagatggctgtaggcagcggtcaccgagcagaagatatgtaattcgccagagagcgacggcccttgctgatcgatggtgtggcgcaactgctgatactgcaacagcgtttgctgggcgaaaacgcgcagctcttcgcccgcttcagtcagcgtcaccgtgcggttatcgcgcacaaacagcggctgaccgagatcttcttccaggcgctgaatctgccgtgagagcgtggatgggctaacgtgcatcgcccgcgcgctgcggccaaaatggcggctttccgccagatgcaggaaggttttcagatcgcgtaaatccacagggacagccctcgatgttgacgttgcaaaaattgcaatgtgacgttgtgaatatatcaatttccgcaataaatttcctgtcatatagtgaattcaatctcgcaaacgcgaaccgaacaataagaagcacaacatcacgaggaatcaccatggctaactacttcaatacactgaatctgcgccagcagctggcacagctgggcaaatgtcgctttatgggccgcgatgaattcgccgatggcgcgagctaccttcagggtaaaaaagtagtcatcgtcggctgtggcgcacagggtctgaaccagggcctgaacatgcgtgattctggtctcgatatctcctacgctctgcgtaaagaagcgattgccgagaagcgcgcgtcctggcgtaaagcgaccgaaaatggttttaaagtgggtacttacgaagaactgatcccacaggcggatctggtgattaacctgacgccggacaagcagcactctgatgtagtgcgcaccgtacagccactgatgaaagacggcgcggcgctgggctactcgcacggtttcaacatcgtcgaagtgggcgagcagatccgtaaagatatcaccgtagtgatggttgcgccgaaatgcccaggcaccgaagtgcgtgaagagtacaaacgtgggttcggcgtaccgacgctgattgccgttcacccggaaaacgatccgaaaggcgaaggcatggcgattgccaaagcctgggcggctgcaaccggtggtcaccgtgcgggtgtgctggaatcgtccttcgttgcggaagtgaaatctgacctgatgggcgagcaaaccatcctgtgcggtatgttgcaggctggctctctgctgtgcttcgacaagctggtggaagaaggtaccgatccagcatacgcagaaaaactgattcagttcggttgggaaaccatcaccgaagcactgaaacagggcggcatcaccctgatgatggaccgtctctctaacccggcgaaactgcgtgcttatgcgctttctgaacagctgaaagagatcatggcacccctgttccagaaacatatggacgacatcatctccggcgaattctcttccggtatgatggcggactgggccaacgatgataagaaactgctgacctggcgtgaagagaccggcaaaaccgcgtttgaaaccgcgccgcagtatgaaggcaaaatcggcgagcaggagtacttcgataaaggcgtactgatgattgcgatggtgaaagcgggcgttgaactggcgttcgaaaccatggtcgattccggcatcattgaagagtctgcatattatgaatcactgcacgagctgccgctgattgccaacaccatcgcccgtaagcgtctgtacgaaatgaacgtggttatctctgataccgctgagtacggtaactatctgttctcttacgcttgtgtgccgttgctgaaaccgtttatggcagagctgcaaccgggcgacctgggtaaagctattccggaaggcgcggtagataacgggcaactgcgtgatgtgaacgaagcgattcgcagccatgcgattgagcaggtaggtaagaaactgcgcggctatatgacagatatgaaacgtattgctgttgcgggttaagtgcgcgctgatgccctcaccccgaccctctcccacagggagagggagaaaacactcaaggccttctcctggagaaggccttgctattagttgcggtacagcaccttaatgatgtgatatccgaactgggtgtgcagcgggccggtcggctccagtaccggacaagagaaaaccactttatcgaacgccggaaccatctgaccctggcggaattcacctaaatcaccgccgcgtttgcctgatgggcaaatggagtgtttcttcgccagcttgccgaaatcggccccgttcttaatctgctcgagaagatccagagccagtttctcttcttttacaaggatatgcagtgctgctgctgtttttgccatgatcgtgccttgagtgaataattgtcaggcggcgattttagcatgatccgcagatgctaacgtaattgtcagtcagggagtggctggtacatatatggcaaaagcccggaaaatccgggcttcgcaggtccctcaaggggagaaaacttagggcctctatgggctacaaagtcattatcggggatggttattttattgtcaatttatgagcgatatggcattgattgacttgatgaccgccctctgtatgtctgcaaccaactcatgtggcaaacattgattaagataccctctgtaagtccttgctctgtttaatctgtttcgactgacttgttgtaccaggtcggctttggcccaacgaatctgctgatcaaagaattgcagatcattgataacattactggctatttcaacatgcattccacgttttaacttgtctggtcgcgagtggttgataatggaacgacgatgcatgcgttgccattaatttttccgttgagcacgacaactaacctgttttttatcatttcaggaggaatgcggccatcgtaatacgtcgtgctgaacggtccattttggctaacaggatagttaccaaagttgcattccagtatttcaccaaccttagggctgaaattaatcgccacgagtaaacctctccttagtaaactctgaaaaagtaataacacaacgttacgacccgatattttctaagtctaatggattcacgatgaactccgatttcggtcttctctctctgatttaaacatccgcagccaaccggttagcggcttacacgcggtcacattcaaatgcgattctgctacaatcctccccccgttcgaagattgagcaatacacctatgcgtctaaaccccggccaacaacaagctgtcgaattcgttaccggcccctgcctggtgctggcgggcgcgggttccggtaaaactcgtgttatcaccaataaaatcgcccatctgatccgcggttgcggttatcaggcgcggcacattgcggcggtgacctttactaataaagcagcgcgcgagatgaaagagcgtgtagggcagacgctggggcgcaaagaggcgcgtgggctgatgatctccactttccatacgttggggctggatatcatcaaacgcgagtatgcggcgcttgggatgaaagcgaacttctcgttgtttgacgataccgatcagcttgctttgcttaaagagttgaccgaggggctgattgaagatgacaaagttctcctgcaacaactgatttcgaccatctctaactggaagaatgatctcaaaacaccgtcccaggcggcagcaagtgcgattggcgagcgggaccgtatttttgcccattgttatgggctgtatgatgcacacctgaaagcctgtaacgttctcgacttcgatgatctgattttattgccgacgttgctgctgcaacgcaatgaagaagtccgcgagcgctggcagaacaaaattcgctatctgctggtggatgagtatcaggacaccaacaccagccagtatgagctggtgaaactgctggtgggcagccgcgcgcgctttaccgtggtgggtgacgatgaccagtcgatctactcctggcgcggtgcacgtccgcaaaacctggtgctgctgagtcaggattttccggcgctgaaggtgattaagcttgagcagaactatcgctcttccgggcgtattctgaaagcggcgaacatcctgatcgccaataacccgcacgtctttgaaaagcgtctgttctccgaactgggttatggcgcggagctaaaagtattaagcgcgaataacgaagaacatgaggctgagcgcgttactggcgagctgatcgcccatcacttcgtcaataaaacgcagtacaaagattacgccattctttatcgcggtaaccatcagtcgcgggtgtttgaaaaattcctgatgcaaaaccgcatcccgtacaaaatatctggtggtacgtcgtttttctctcgtcctgaaatcaaggacttgctggcttatctgcgcgtgctgactaacccggacgatgacagcgcatttctgcgtatcgttaacacgccgaagcgagagattggcccggctacgctgaaaaagctgggtgagtgggcgatgacgcgcaataaaagcatgtttaccgccagctttgatatgggcctgagtcagacgcttagcggacgtggttatgaagcattgacccgcttcactcactggttggcagaaatccagcgtctggcggagcgggagccgattgccgcggtgcgtgatctgatccatggcatggattatgaatcctggctgtacgaaacatcgcccagcccgaaagccgccgaaatgcgcatgaagaacgtcaaccaactgtttagctggatgacggagatgctggaaggcagtgaactggatgagccgatgacgctcacccaggtggtgacgcgctttactttgcgcgacatgatggagcgtggtgagagtgaagaagagctggatcaggtgcaactgatgactctccacgcgtcgaaagggctggagtttccttatgtctacatggtcggtatggaagaagggtttttgccgcaccagagcagcatcgatgaagataatatcgatgaggagcggcggctggcctatgtcggcattacccgcgcccagaaggaattgacctttacgctgtgtaaagaacgccgtcagtacggcgaactggtgcgcccggagccgagccgctttttgctggagctgccgcaggatgatctgatttgggaacaggagcgcaaagtggtcagcgccgaagaacggatgcagaaagggcaaagccatctggcgaatctgaaagcgatgatggcggcaaaacgagggaaataatcaaggccggaaaagatgcgtcagcatcgcatccggcacttactcattaatgcacttccagcggccagtggacatagctctgccactggctttcctgagcaataatctctttacccagcggatgttgggttagccaaccttgcggaagcgtcaaggtcaacagttcatggttagcctgtaatgtcatctctggcacgagatcgtcacggcgacggctggcaaaaatgatggccaggcgtagtaaacggcagagttgttctgcgacgcgcggcggtacggcattttgctgatgcagcgatgagagatcgaccggattagtctggttgagcagtagcgtcgccagcaattttttctgtgcgggggtaaaaccgggaagatccagattacgcaccagataagcagcgtgttgcggcgcttgtttgaagtcaacgctcaggccgatttcatgaagctgacaggcgctgatgagcaaatcgcggcttattgcttcaagatgccattcgttttccacctgatcgaagaagttagccgcaactttggctacgcgctgtgcctgatcaatatcgatcataaagcggcgttgaatattacgcagcgtacggctgcgaatatcctgctcgacggccagatgcaacatgccgtagaccaggccttcacgcagcgcaccgcccgccagggtcatacactgaatattcagttcggtaaaaatggcgatcaggatcgccagaccactcgggaacactaacgcacgttccagcgtcagcccgtcaatctccagttcctccagccgaccgcaatgaatggctcgctgtttcaattgctgcaacttttccagggtaatgcgttcatccatcccctgtgccatcatgatttcctgtaacgcctgcacggtgccggaagcaccaacgcacactttccagccgtgataccgtaattcatcggcaaccggacgtaacacttcgcgtgccgctttttctgcagcatcaaaattttcctgccccagattacgatcggcaaaatagcgttccagccaggtgacgcagcccatcgacaggctgaacaacgaggtggtttgtgcacccgtgccggttaccagttcagtactggctccgcctatatccaccaccaggcgctgatcggcaccaccagtggtgtgagcaacgccctgataaatcagacgtgcttcctcttcaccgctgatcacctgtaccggacaaccgagaatttcctgcgctttggcaataaaatcacccgcattgacggcaaggcgtaacgtcgccgtagcgacaacgcgaatttgcgagggaggaatatcttgcagacgttcagcaaacaggcgcaaacattgccaaccgcgctccattgcttcattggagagggcattttcgctattcaggccagcagccagacgcactttgcgttttattcgcgtcagcgtctggatgcttccagccacctcgcgcacaaccagcatatgaaaactattcgaaccgagagcaatggctgcatacagcgacgaggtggaacccatactcttcatccttcaatctgtctctgtgttggctgcattctttcacctgaatcacttactacagtaagctcatcgggattcattctcttgccatcttgatacagtttgaatgattttgagtatgacattttttatttaacctgaacgacgacgattacgcggagcgccagtacgacgcggaccattgcctgtgcgcgggcgcgtgaggcgcagcggttttggcagatcggtcatcaatgcgtccggattgtatttgcttaccggaattgagtgaccaatataggtctcaatagcaggcaaattcaatgcatactcttcacacgccaggctgatagagtgaccgcttgcgcctgcgcgacctgtacgaccaatacggtgaacgtaatcttcacagtcatcgggtaaatcgtagttaaagacgtgcgtcactgccggaatatgcaaaccacgcgcggcaacgtcggtggcaaccagaatatccagatcgccacgggtaaattcatcaagaatacgcagacgttttttctgcgcgacatcgcctgtcaataaaccgacacgatgaccatctgctgccaggtggccccagatctcttcacaacggtgtttggtgttggcgaaaataatcgctctgtctggccactcttcttcgatcagcgtttgcagcaaacgcattttttcttcgttagaagggtagaaaagctcttctttaatacggtggcccgttttctgttccggttccacttcaatatattcggcattgttcatctgctcgaacgccagttcacgtacccggtacgaaagcgtggcggagaacagcatgttgaggcgctggtttgcaggcggcatacggcggaacagccagcggatatctttaataaagcccagatcgtacatgcgatcggcttcgtccagtaccaccacctgaatggcaccgaggttaatgtggttctgcttggcgtagtcaattaaacgccccgtggtgccaatcagaatgtcaacgccgctttccagcactttcagctgtttgtcgtagccatcaccaccgtaagccagacccagcttcaggccagtagcttccgccagcggttctgcgtcggcatggatctgcacggcaagttcacgcgtcggtgccataattaaggcacgcggctgattcaccttgcgatcggcaatcgcaggatgagagagaagataatgaaacgttgacgtaagaaacgccatcgttttcccggtaccggtttgcgcctgcccggctacgtcacgacccgccagcgtcagcggaagggccagtgcctgaatgggcgtacagttatgaaacccttttttttcaagggcttctacaaccttcggatgcagggcgaagtcggaaaacttctgttctgttaaatgtgttttgctcatagtgtggtagaatatcagcttactattgctttacgaaagcgtatccggtgaaataaagtcaacctttagttggttaatgttacaccaacaacgaaaccaacacgccaggcttattcctgtggagttatatatgagcgataaaattattcacctgactgacgacagttttgacacggatgtactcaaagcggacggggcgatcctcgtcgatttctgggcagagtggtgcggtccgtgcaaaatgatcgccccgattctggatgaaatcgctgacgaatatcagggcaaactgaccgttgcaaaactgaacatcgatcaaaaccctggcactgcgccgaaatatggcatccgtggtatcccgactctgctgctgttcaaaaacggtgaagtggcggcaaccaaagtgggtgcactgtctaaaggtcagttgaaagagttcctcgacgctaacctggcgtaagggaatttcatgttcgggtgccccgtcgctaaaaactggacgcccggcgtgagtcatgctaacttagtgttgacttcgtattaaacataccttattaagtttgaatcttgtaatttccaacgcttcccgttttatcttaaatgcgaagtgaacagatttctggctcgtcactcaatccgtcttgtcgtttcagttctgcgtactctcctgtgaccaggcagcgaaaagacatgagtcgatgaccgtaaacaggcatggatgatcctgccataccattcacaacattaagttcgagatttaccccaagtttaagaactcacaccactatgaatcttaccgaattaaagaatacgccggtttctgagctgatcactctcggcgaaaatatggggctggaaaacctggctcgtatgcgtaagcaggacattatttttgccatcctgaagcagcacgcaaagagtggcgaagatatctttggtgatggcgtactggagatattgcaggatggatttggtttcctccgttccgcagacagctcctacctcgccggtcctgatgacatctacgtttcccctagccaaatccgccgtttcaacctccgcactggtgataccatctctggtaagattcgcccgccgaaagaaggtgaacgctattttgcgctgctgaaagttaacgaagttaacttcgacaaacctgaaaacgcccgcaacaaaatcctctttgagaacttaaccccgctgcacgcaaactctcgtctgcgtatggaacgtggtaacggttctactgaagatttaactgctcgcgtactggatctggcatcacctatcggtcgtggtcagcgtggtctgattgtggcaccgccgaaagccggtaaaaccatgctgctgcagaacattgctcagagcattgcttacaaccacccggattgtgtgctgatggttctgctgatcgacgaacgtccggaagaagtaaccgagatgcagcgtctggtaaaaggtgaagttgttgcttctacctttgacgaacccgcatctcgccacgttcaggttgcggaaatggtgatcgagaaggccaaacgcctggttgagcacaagaaagacgttatcattctgctcgactccatcactcgtctggcgcgcgcttacaacaccgttgttccggcgtcaggtaaagtgttgaccggtggtgtggatgccaacgccctgcatcgtccgaaacgcttctttggtgcggcgcgtaacgtggaagagggcggcagcctgaccattatcgcgacggcgcttatcgataccggttctaaaatggacgaagttatctacgaagagtttaaaggtacaggcaacatggaactgcacctctctcgtaagatcgctgaaaaacgcgtcttcccggctatcgactacaaccgttctggtacccgtaaagaagagctgctcacgactcaggaagaactgcagaaaatgtggatcctgcgcaaaatcattcacccgatgggcgaaatcgatgcaatggaattcctcattaataaactggcaatgaccaagaccaatgacgatttcttcgaaatgatgaaacgctcataaatttgtcttatgccaaaaacgccacgtgtttacgtggcgttttgcttttatatatgtaatcttaatgccgcgctggcgatgttaggaaaattcctggaatttgctggcatgttatgcaatttgcatatcaaatggttaatttttgcacagggctggtgggtttggaacggactttcccttctgaataaaggtcttcgtggttatacttctgctaataattttctctgagagcatgcattgtgaatttactgacagtgagtactgatctcatcagtatttttttattcacgacactgtttctgttttttgcccgtaaggtggcaaaaaaagtcggtttagtggataaaccaaacttccgcaaacgtcaccagggattgatacctctcgttggggggatttcggtttacgcagggatttgcttcacgttcggaattgtcgattactatattccgcatgcatctctctatctcgcttgtgccggtgtgcttgttttcattggcgcgctggatgaccgttttgatatcagcgtaaaaatccgtgccaccatacaggccgctgttggcattgttatgatggtgttcggcaagctttatctcagtagcctgggttatatctttggctcctgggagatggtgctcggaccgtttggttacttcctgacgctatttgccgtctgggcggccattaatgcgttcaacatggttgatggcattgatggcttgctgggcgggttgtcctgcgtctcgtttgcagcaatcggtatgattttgtggttcgacgggcaaaccagcctcgcaatctggtgctttgcgatgatcgccgccatcctgccatacatcatgcttaaccttggtatcctgggtcgccgctacaaagtctttatgggtgatgcgggcagtacgctgattggttttaccgttatctggatcctgctcgaaacgacccagggcaaaacccatcccatcagcccggttaccgctttgtggataatcgccattccgctaatggatatggtggcgattatgtaccgtcgcctgcgtaaaggcatgagcccattctctcctgaccgtcagcatattcaccatttgatcatgcgtgccgggtttacttcccgtcaggcgtttgtgctgattacccttgccgcagcactgctcgcttccattggcgtgctggcagaatattctcattttgtcccggagtgggtcatgctggtgctctttttgctagcattcttcctctatggatattgcattaagcgtgcctggaaagttgctcgctttattaagcgcgtaaaacgcagactgcgtagaaatcgtggtggcagccccaatttaaccaaataaatgaggatgtgatgacacaaccaatgcctgggaaaccggccgaagacgctgaaaatgaactggatattcgtgggttgtttcgtaccttgtgggctgggaagctatggattattggcatggggctggcgtttgcgttaatcgcgctggcgtatacgttttttgctcgtcaggagtggagctcgacggcgattaccgatcgtccaacggtgaatatgctggggggatattactcgcagcagcaatttttgcgtaacctggatgtccgttcaaacatggcttctgccgaccaaccatcggtcatggacgaagcctataaagagtttgttatgcaactggcctcgtgggatacccgcagagagttctggctgcaaaccgactattacaaacagcggatggtgggcaacagcaaagccgatgcggcgttgctggatgaaatgattaacaacatccagtttatccccggagactttacccgcgcggtcaatgacagcgtgaagcttattgccgaaaccgcgcctgacgctaataacctgttacgtcagtatgttgcttttgccagccagcgtgcagccagccatctgaatgatgagctgaaaggcgcatgggcggcgcgtaccatccagatgaaagctcaggtgaagcgtcaggaagaggtggcgaaagccatctacgaccgccggatgaacagcattgagcaggcgctgaaaattgctgagcagcataatatttcgcgcagtgcgacagatgtacctgccgaggaattacctgattcagaaatgttcctgcttgggcgtccaatgcttcaggctcgactggaaaatttacaggccgtcggtccggcctttgatctcgactatgatcagaatcgggccatgttaaacaccctgaatgttggtccaaccctggatccgcgttttcagacctatcgctatttgcgtacgccggaagaaccggtaaaacgcgatagcccacgtcgtgccttcctgatgattatgtggggcattgtcggggggctgatcggggctggtgtcgcattaacccgccgttgctcgaaatagcaacactgctgcggtgagcgcaaaggcgctcgccgcttattcgaagagaatcgatgtgaaagtactgactgtatttggtacgcgcccggaagccatcaagatggcgccgttggtgcatgcgttggcaaaagatcctttttttgaggctaaagtttgcgtcactgcgcagcatcgggagatgctcgatcaggtgctgaaactcttttccattgtacctgactacgatctcaacataatgcagccaggacagggcctgacagagataacctgtcggattctggaagggctaaaacctattcttgccgagttcaaaccagacgtcgtgctggttcacggcgatacgacgacgacgctggcaaccagcctggcggcgttttatcagcgtattcctgttggtcacgttgaggctggtctgcgcacgggcgatctctattcgccgtggccggaagaggctaaccgtacattgaccgggcatctggcgatgtatcacttctctccaaccgaaacttcccggcaaaacttgctgcgtgaaaacgttgcggatagccgaatcttcattaccggtaatacagtcattgatgcactgttatgggtgcgtgaccaggtgatgagcagcgacaagctgcgttcagaactggcggcaaattacccgtttatcgaccccgataaaaagatgattctggtgaccggtcacaggcgtgagagtttcggtcgtggctttgaagaaatctgccacgcgctggcagacatcgccaccacgcaccaggacatccagattgtctatccggtgcatctcaacccgaacgtcagagagccggtcaatcgcattctggggcatgtgaaaaatgtcattctgatcgatccccaggagtatttaccgtttgtctggctgatgaaccacgcctggctgattttgaccgactcaggcggcattcaggaagaagcgccttcgctggggaaacctgtgctggtgatgcgcgataccactgagcgtccggaagcggtgacggcgggtacggtgcgtctggtaggcacggataagcagcgaattgtcgaggaagtgacgcgtcttttaaaagacgaaaacgaatatcaagctatgagccgcgcccataacccgtatggtgatggtcaggcatgctctcgcattctggaagcgttaaaaaataatcggatatcactatgagttttgcgaccatttctgttatcggactgggttatatcgggctgccaacggcagcagcgtttgcctcacggcaaaaacaggtaattggtgtcgatatcaaccaacatgcggttgataccatcaatcgtggcgaaatccatatcgtcgaacctgatttggcgagtgtagtaaaaactgccgtagaaggcggttttttacgagcgagcacgacgccagttgaagcggatgcctggctgattgctgtacccacgccgtttaagggcgatcatgagccagatatgacctacgttgaatcggctgctcgctccattgcgccagtgctgaaaaaaggcgcgctggtgatccttgaatccacctcgccggtggggtcaaccgagaagatggcagaatggttagcagagatgcgtccggatctcactttcccgcagcaggtgggcgagcaggcggacgtcaacattgcttactgcccggaacgcgtgttaccaggacaggtaatggtcgagctgattaaaaacgatcgcgtgattggtggtatgacgccggtttgttcggcccgcgccagcgaactgtacaaaattttcctcgaaggtgagtgtgtcgtcactaactcgcggacggcggaaatgtgtaagctcaccgaaaacagcttccgcgatgtgaatatcgcttttgctaatgaattgtcgctgatttgtgccgatcaggggattaacgtctgggaactgattcgcctggcgaatcgtcaccctcgcgttaatattcttcagcctggccctggcgtgggcggtcactgcattgctgttgatccgtggtttatcgtggcacagaacccccagcaggcgcggcttatccgtaccgcgcgcgaagtgaacgatcacaaaccgttctgggttatcgatcaggtgaaagcggcggtggctgattgcctggcggctaccgataaacgcgccagtgaactgaaaatcgcctgctttggtctggcgtttaaaccgaatattgatgacctgcgcgaaagcccggcgatggaaatcgctgaactgatcgcccagtggcatagcggcgaaactctggttgttgagcctaacatccaccagttgccgaaaaaactgaccgggctttgtactctggcgcagcttgacgaggcgctggcaacggcagacgtgctggtgatgctggtcgatcatagtcagttcaaagttatcaatggcgacaatgtccatcagcagtatgtcgtcgatgccaaaggagtctggcgctgatgagaaaaattctgataacaggtggtgccgggtttattggctcggcgctggtgcgttatatcatcaacgaaacgagcgacgcggtggtagtggtcgataagctgacctacgccggaaacctgatgtcgctggcaccggtcgcgcaaagcgagcgctttgcctttgagaaagttgatatctgcgatcgggcagaactggcacgcgtattcactgagcatcagccagactgtgtcatgcatctggcagccgaaagccatgttgaccgttctattgacggcccggcagcgtttattgaaaccaacattgtcgggacttatacattgcttgaagcggcgcgggcttactggaatgcgctgacggaagataaaaaatcagcgttccgttttcatcatatctccactgacgaagtatatggtgacctgcactcgacggatgatttcttcaccgaaaccacgccgtatgcgccgagcagcccttattccgcgtcaaaagccagcagcgaccatctggtgcgcgcctggctgcggacctatggtctgccgacgcttatcaccaactgctcgaataactacggcccttaccactttccggaaaaactgatcccgctgatgatcctcaacgcgctggcgggtaaatcgctgccggtatatggcaacgggcagcaaatccgtgactggctgtatgtggaagatcacgcccgcgcgctgtattgcgtggcgaccaccgggaaagtcggtgaaacctataatattggtggtcacaacgagcgtaagaatctcgatgttgtggaaaccatttgcgagctgctggaagaactggctccgaacaagccgcacggcgtggcgcactatcgtgacctgatcacctttgtcgctgaccgtccggggcatgatctgcgttatgccattgatgcttcgaaaattgcccgtgaacttggctggctgccgcaggaaacctttgaaagtggaatgcgtaaaacggttcagtggtatctggctaatgaaagctggtggaagcaggtgcaggacggcagctatcagggcgagcgtttaggtctgaaaggctaattttcagcggaggcaaacatgaaaggtattatcctggcgggcggttccggcacccgattgcatccgattacgcgcggcgtatcgaagcaactgttgccgatttacgataagccaatgatttactatccgctgtcggtgctgatgctggccggtatccgcgaaattctcatcatcactacgccggaagataaaggttatttccagcgcctgctgggcgatggtagtgagttcggtatccagctggaatatgccgaacagcccagcccggacggtctggcgcaggcctttatcatcggtgaaaccttccttaatggtgaaccttcttgtctggtgctgggcgataacatcttcttcggtcagggcttcagtccgaagctgcgtcatgttgcggcgcgcaccgaaggggcgacggtttttggctatcaggtgatggacccggaacgctttggcgtggtggagtttgacgacaatttccgcgctatctcgctggaagaaaagccaaaacagccgaagtcaaactgggcggtgaccgggctttatttctacgacagtaaagtcgtggagtacgcaaagcaggtgaagccgtcggagcgtggtgaactggagattacctccatcaaccagatgtacctcgaggcgggcaacctgaccgttgaactgctcgggcgcggatttgcctggctggataccggcactcacgacagcctgattgaagccagcacctttgtacagacggtggaaaaacgccagggctttaagattgcctgcctggaagagattgcctggcgtaacggctggctcgatgacgagggtgtgaagcgtgctgccagttcattagcgaaaactggctacggccaatatctgctggagttacttcgtgcccgtccgcgccagtattgagccactaacctgggaaaacgccttctttggtgttaacagcgccatcgtgcgcattacgtctgaagcaccgctcctgacgccagacgcgttagcgccgtggtcacgggtgcaggccaaaattgcggcatcaaatacgggtgaactggatgccctgcaacagctgggattctccctggtagaaggtgaagttgatttggcgctacccgtgaacaatgccagtgatagcggtgctgtagtggcacaagagaccgatattcccgcattacgtcagttagccagcgccgcatttgcgcaaagccgttttcgtgcgccgtggtatgcgcctgacgccagcagtcgcttttatgcacagtggattgaaaatgccgtgcgcggcacctttgatcatcaatgtctgattttacgtgcggcgtccggcgatattcgcggctatgtctctttacgggaactcaatgcgacagatgcgcgaattggcctgctggctggacgcggtgcaggtgctgagctgatgcaaacggcgctaaactgggcgtatgctcgcggtaaaacaactttgcgggtggcgacccaaatgggcaacaccgccgcgcttaaacgatacatacaaagtggtgcgaatgtagaaagcaccgcgtactggttatacaggtgatcacatgattccatttaacgcaccgccggtggtgggaaccgaactcgactatatgcagtcggcaatgggtagcggcaaactgtgtggcgatggcggttttacccgtcgctgccagcagtggctggagcaacgttttggcagcgccaaagtgttactgacgccgtcctgcaccgcttcgctggagatggcggcgctgctgctcgatatccagcctggcgatgaagtgatcatgccgagctacacctttgtctccaccgccaatgcctttgtgctgcgtggcgcaaaaatcgtttttgtggatgttcgcccggacaccatgaacatcgacgaaacgctgattgaagcggcgatcaccgacaaaacgcgcgttatcgtgccggtccattacgcgggtgtggcctgcgaaatggacaccattatggcgttggcgaaaaagcataatttgtttgtggtagaagatgccgctcagggcgtgatgtccacttacaaagggcgtgcactgggaaccattggtcatattggctgctttagcttccatgaaaccaaaaactacacggcgggcggtgaaggcggcgcgacgctgattaacgataaagcgttaatcgaacgagccgagatcatccgtgaaaagggcactaaccgcagccagttcttccgtggtcaggtcgataaatatacctggcgcgatattggctccagctatttgatgtccgatctgcaagctgcatacctgtgggcgcaactggaagcagcggatcgtatcaaccagcaacgtctggcgctgtggcaaaactactacgatgcgttagcgcctctggcgaaagccgggcgtatcgagctgccgtcgattcccgatggctgcgtgcagaacgcgcatatgttctacattaaactgcgggatattgatgaccggagcgcgttgattaactttctgaaagaagcggaaatcatggcggtgtttcattacattccgctgcacggttgccctgcgggggaacactttggtgagttccacggtgaagatcgctacaccaccaaagagagcgagcgcctgctgcgcctgccgctgttctacaacctgtcgcccgtcaatcagcgtacggtaattgcgactttgttgaactacttttcctgatatgtcgttggcaaaagcgtccttgtggacggcggccagtacactggtcaagattggtgccgggttactggtcggtaagttgctggcggtgtcatttggtccggcggggcttgggctggcggcaaatttccgccagttgattaccgtgctcggcgtgcttgccggggctggcatctttaacggtgtaaccaaatacgttgcccagtaccatgataatccgcaacagctgcgccgcgtggtcggcacttcatcagcgatggtacttggtttctctacgctgatggcgctggtttttgtgctggcagctgcgccaatcagccagggattgtttggtaataccgactatcaggggctggtgcgtttagtggcgctggtgcaaatggggatcgcctggggcaacctgttactggcgctgatgaaaggctttcgcgatgccgcaggtaatgcgttatcgctgattgtcggcagcttgattggcgttctcgcgtactacgtcagttaccgtttgggcggttatgaaggggcgttgctgggtctggcgctgattcccgcgctggtggtaattcctgccgccatcatgttgatcaaacgtggtgtcatcccgttaagctatctgaaacccagctgggataacggtctggcagggcagttgagcaaatttacgctcatggcgttgattacgtcggtgaccttgcctgttgcttacatcatgatgcgtaaactgctggcggcgcagtatagctgggatgaggtggggatctggcaaggggtgagcagtatttccgatgcctacctgcaatttattacggcatcgttcagcgtatatttgctgcccacgttgtcgcggctaacggaaaagcgcgatatcacccgggaagtggttaaatcgctgaaattcgtcttaccggcagtggcggcggcgagttttaccgtctggctgctgcgtgattttgctatctggctgctgttgtcgaataaatttaccgctatgcgcgatctctttgcctggcagttagtgggtgatgtgttaaaagtgggcgcttatgtctttggttatctggtgatcgccaaagcgtcactgcggttttatattctggcggaagtcagccagttcactttattgatggtatttgcccactggctaatccctgcgcatggtgcactgggcgcggcgcaggcatatatggcaacttatatcgtctatttttctctttgttgtggcgtgtttttactctggcgtaggcgggcatgactgtactgattcacgtactgggatcggatatccctcaccataaccgaaccgttttgcggtttttcaatgacgcgctggccgcgacgagcgagcacgcgcgcgagtttatggttgttggcaaggacgacggcttaagtgatagctgtccggcgctttctgtgcaatttttccctgggaaaaaatcgctggcggaagcggtcatcgcgaaagcaaaagctaaccgtcagcagcgttttttcttccacggtcagttcaatcccacactgtggctggctctgctgagtggtggcattaagcccagccagtttttctggcatatctggggggcagacctgtatgagctttccagtggcttgagatataagcttttttacccactacgtcgcctggcgcaaaagcgagtcggctgtgtatttgccacccgcggcgatttgagcttttttgccaaaacgcacccaaaggtgcggggcgaactgctgttcttcccgacgcggatggacccttcgctcaatacgatggcgaacgatcggcaacgtgaagggaaaatgaccattctggtggggaactccggcgaccgcagcaatgagcatattgctgccttgcgcgccgttcatcagcaatttggcgatacggtaaaagtggtggtgccgatgggatatccgcctaataacgaagcgtacattgaggaagttcgtcaggcggggctggagttattcagcgaagaaaatctacaaattctgagcgaaaaactggaatttgacgcctatctggcgctacttcgtcagtgcgatcttggttactttatttttgcccgccagcagggcattggtacgctgtgcttactgattcaggcgggcattccttgtgtgcttaaccgggaaaatccgttctggcaggatatgacggaacaacatttgccggtgctgtttactaccgacgatctcaacgaggatattgtgcgtgaagcgcagcgccagttggcgtcggtggataaaaacaccattgccttctttagccctaactatctacaaggctggcagcgggcgttggcgattgccgccggggaggtcgcatgagtctgctgcaattcagtggcctgtttgttgtctggctgctctgcacgctgtttattgccacgctgacctggtttgagtttcgccgtgtgcgctttaacttcaatgtcttcttttcattgctgtttttgctcacctttttcttcggcttcccgctgaccagcgtgctggtatttcgctttgatgttggtgtcgcgccgccagaaatcttgttgcaggcgttgctttctgcgggctgcttctacgcggtttactatgtcacctacaaaacccgcctacgcaaacgcgttgctgatgtaccgcgccgtccgctgtttaccatgaaccgcgtggagaccaatcttacgtgggtgatcctgatgggtatcgcgctggtaagcgtcggcatcttcttcatgcacaacggctttttgctgttccggcttaactcctacagtcagatcttttccagtgaagtctccggcgtggcgttaaaacgcttcttttactttttcatcccggcgatgctggtggtctactttctgcgccaggacagcaaagcgtggctgtttttcctcgtcagcacggtcgcctttggcttgctgacttatatgattgtcggcggcactcgcgccaatatcatcatcgcattcgctatcttcctgtttattggcattattcgcggctggatttcgttgtggatgctggcggcggcgggcgtgctggggattgttggcatgttctggctggcactaaaacgctatggaatgaatgtgagcggcgatgaagcgttctatacgtttctctatctcactcgcgacaccttctcgccgtgggagaatctggcgttgctgttgcagaactacgacaacatcgacttccagggcctggctccaattgtccgcgatttctatgtctttatcccttcctggctgtggccgggtcgcccgagtatggtgctgaactcagccaactactttacctgggaagtgctgaataaccactccggactggcgatctcgcctacgcttataggctcactggtggtgatgggcggcgcgttgttcatcccgctcggggcgatcgtggttggtctgatcatcaaatggttcgactggctgtatgagctgggcaaccgcgagcctaatcgctataaagctgcgatattgcacagtttctgctttggggcgatcttcaatatgatcgtgctggcgcgtgaagggctggattcgtttgtctcacgcgtggtcttttttatcgtggtcttcggcgcatgtctgatgatcgcaaaactgttgtactggctttttgaaagcgccggactcattcataaacgtacaaaatcatcgctccggacgcaggttgaaggataacaatgaataacaacaccacggcaccaacctatacgctgcgtggcttacagttgattggttggcgtgatatgcagcacgccctcgattatctgtttgctgacgggcagcttaagcagggaacgctggttgccattaatgctgaaaaaatgctgactattgaagataacgccgaggtcagggagttaattaacgctgccgaatttaaatatgcggatggcatcagcgttgtacgttcagtacgtaaaaagtacccgcaggcgcaggtttcccgcgttgccggtgccgatctctgggaagagctgatggcgcgcgcaggcaaagaagggacgccggtatttcttgtgggcggtaaacctgaagtgctggcgcaaactgaagctaaactgcgcaaccagtggaatgtgaatatcgttggcagtcaggatggttattttaaacccgagcagcgtcaggcgctgtttgaacgcattcatgccagcggtgcgcaaatcgtcaccgttgcgatgggatcgccaaagcaggagatcatcatgcgcgactgccgtctggtacatccagatgcgctgtatatgggcgttggcgggacttacgatgttttcaccggtcacgtaaaacgcgcaccgaaaatctggcaaacgctggggctggagtggctctaccgcctgctttcgcagccgagccgcattaagcgtcagcttcgtttgctgcgttatttacgctggcactacaccggcaacctatgattttcctctctttgtaaagcgacggagtggtcactccgtcgcctgtctgcttttttattacacaaagcattcaaatttttaatgctttatttgccatttctcctgaattacgaaaacatttgcaacactcgatgtacccataacgataaccggtaacaccggaaagcatgcaaacacaacacgaggatttatggcagataacaaaccagagctacagcgtgggctggaagctcgacatatcgaactcatcgccctggggggcaccattggcgtcggcctgtttatgggggccgccagtaccctgaaatgggccgggccatccgtattgttggcctatatcatcgccgggctgttcgtctttttcatcatgcgttcaatgggcgaaatgttgttcctcgaaccggttaccggttcgttcgccgtttatgcgcatcgttatatgagcccgttctttggctatctcaccgcctggtcttactggtttatgtggatggcggtggggatctctgaaatcaccgccattggcgtttatgtccagttctggttcccggagatggcgcagtggatacccgcattgatcgcagtggcgctggtggcgttggcgaatctggcggcggtgcggttgtacggcgaaatcgagttctggttcgcgatgatcaaagtcaccacgattatcgtgatgattgtcattggcctgggcgtgattttctttggctttggcaatggcgggcagtcgattggttttagcaatctcacagagcatggcggtttctttgcgggtggctggaaagggttcctgaccgctctgtgtattgtggtggcgtcctaccagggcgtggagctgattggcattactgccggtgaagcgaagaatccgcaggtgacgctgcgcagtgccgtaggcaaggtgctgtggcggatcctgattttctacgtaggcgcgattttcgttatcgtcaccatcttcccgtggaatgaaataggcagcaacggcagcccgttcgtactgacttttgccaaaatcggtattaccgcagcggcgggcattatcaactttgtggtgctgacggctgcgctctctggctgtaacagcggcatgtacagttgcggacgtatgctctacgcactggcgaaaaaccgtcagttaccggcggcaatggcgaaagtttcccgtcacggcgtaccggttgcgggtgtggcagtatctattgctattctgctaattggctcatgcctgaactacatcattcccaatccgcagcgtgtgtttgtctacgtctacagtgccagcgtgcttccggggatggtgccatggtttgtgatattgataagccagctgcgttttcggcgtgcacataaagcggcgattgccagccatccgttccgctcaatcctgttcccgtgggccaattacgtaacaatggcattcctgatttgcgttttgatcggcatgtactttaatgaagatacgcgtatgtcgctgtttgttggcatcatctttatgctggcggtgacggcgatttataaagtttttggccttaatcgccacgggaaagcgcataaactggaggaataagcagcaaaacgcacaaaccgtaaccaaacgcgcaatttatttaaaaagggactagacagaggggtgggaagtccgtattatccacccccgaaacggcgctaagcgcccgtagctcagctggatagagcgctgccctccggaggcagaggtctcaggttcgaatcctgtcgggcgcgccatttagtcccggcgcttgagctgcggtggtagtaataccgcgtaacaagatttgtagtggtggctatagctcagttggtagagccctggattgtgattccagttgtcgtgggttcgaatcccattagccaccccattattagaagttgtgacaatgcgaaggtggcggaattggtagacgcgctagcttcaggtgttagtgtccttacggacgtgggggttcaagtcccccccctcgcaccacgactttaaagaattgaactaaaaattcaaaaagcagtatttcggcgagtagcgcagcttggtagcgcaactggtttgggaccagtgggtcggaggttcgaatcctctctcgccgaccaattttgaaccccgcttcggcggggttttttgttttctgtgcatttcgtcaccctcccttcgcaataaacgcccgtaataactcattgccccacggtatgatttcgcccttaacgtattgaaggatgacttcaggcaaggagcgaccatgctgcaacaggttccaacgcgtgcttttcatgtgatggcgaaaccgagcggttccgattgtaatctgaactgtgactactgtttttatctcgaaaaacaatccctttaccgcgaaaagccagtcacgcatatggacgatgacacgctggaagcgtatgtccgtcactatatcgctgccagcgaaccgcaaaacgaagtggcttttacctggcagggcggcgaaccaacgctactcgggctggcgttttaccgccgtgccgtagcgctacaggcgaaatatggtgctggcaggaagataagtaacagcttccagactaacggcgtgctgctggatgacgaatggtgcgcgtttctcgcggagcatcattttcttgttggtttatcgctggatggcccgcctgagatccacaatcaatatcgcgtgactaaaggtggcagacccacgcataagctggtgatgcgtgccctgacgctcctgcaaaaacatcatgtcgactataacgtgctggtctgcgttaatcgcaccagcgcgcagcaaccgttgcaggtatatgattttttgtgcgatgcgggagtcgaattcatccagtttattccggtggtcgagcgcctggctgatgaaacaactgcccgcgatggacttaagttacatgcgcctggtgatattcagggtgagctaacggaatggtcggtgcgccccgaggagttcggtgagtttctggtggcgatattcgaccactggatcaaacgcgacgtcggcaagattttcgtgatgaatatcgaatgggcgtttgccaattttgtcggtgcgccgggtgcggtttgccatcatcagccaacctgtgggcgctcggtgattgttgagcacaacggcgacgtttacgcctgtgatcactatgtttatccgcaatatcggctggggaatatgcaccagcaaacaattgcagaaatgatcgattccccgcaacagcaggcgtttggtgaagataaatttaagcagttaccggcgcagtgtcgcagttgtaacgtgttaaaagcgtgctggggaggctgcccgaaacaccgcttcatgctcgatgccagcggcaaaccgggactgaattatttgtgtgccgggtatcagcgttatttccgccatctaccgccatatcttaaagcaatggctgatttgctggcgcacggtcgcccggccagcgacattatgcatgcgcatttgctggtggtgagtaagtagaaatcggcggccgcctgcggttgattgccggatgcggcgtaaacgccttatccggcctacatgatcgtgcaaattcaataaattgcagcgttctgtaggctggataagatgcgtcagcatcgcatccggcaaaggcagatctcagcgatagcgccggcttagtcagatttaatctgcgcgcgtggtggatattttttcaggatctccatatacgcgtgcatttcggtctgtagcggtacacccatcggaatatggcgcacgccgatggagtcgctttcctgcggatcggtgtagaggttaaacaccgacgatcccgccgtttgcattactgtgccggtgaatccaccctgatatccgctctgggtataagcgtaaggttgctgaatcaggacgtgatacttgaactcatccatacgcacagcagcgagtttaccgttgaggaagtagtgctcggccttacggttagactgaccatttgttcccaggaagaaggatgtctggtccacaccatcgataaaggtggttttcggcactaaattcgccactttcgctccaggatgccctgccagatccagcgcggtagggaagagatctgccagatcgacaataccgtcagatttacgcggttggatcatccctttccagtaaacgaaagtcggtacgcgaacgccgccttcccaggtcgaacctttcgcaccacggaacggggtgcgtccgtgcggcggtacttcggcttccggtccgttatcggaggtaaagacgatcagcgtgttatcaagctgaccgtttttctccagtgttttatacagattagcgaacacatcgttcatctccaccatgcagtcgccatacgaggtgcgtgccggagagctacccgcatatttcgcatttgggtagttatcgaagtggcagccacgagtgccgtagtagaggaagaatggtttatcgctcttcgccatcttgtcgaggaacttaacgccatagtccatccagcgttgatccagatcttccatatatttcggcgtaatgtcggcaatggcctgttgttcgccgccgcgcaccgcatgaacgtcatctttgctgaacggtaattgcttgatgtattcagaacggtccggactcagggccacttccggattgacgtgaacgtcgcgccattcggtgtacatatcagacaccgagttaaagccacggaaatcatcaaagccaacgttctgcggctgcgactctttgttttcccccatatgccattttccgatggcctgagtgacgtagccctgatcgtgcagcaactgcggcagcgtggttaacccttgcagcccgcccggttgcccgtacattggcggcatcagaatgccgtggtggatggagtattgtccggtgagaatggtggcgcgggttggggaagagcttggttgagaatacgccgaagttaaaatcagcccctggctggcaacggcgtcgatatctggtgtagggttacccaccgccacgccgccaccgttaaaaccgacgtccatccagcccacatcgtccagcaagaaaacaaccacattcggtttcttaccggtttttttctcaagttctgccagcttctgctgggtttctttatcctgcgccggatgctgcattactggcatcatattgtcggcaatagtggtcgccggtttaaccagatactggtttgggtgatcgtatccggcaaagcctttgcgtgcggtggcagttgacggggtatctgctgcgctggccatgagaggaagagcggcggcgacagcaacaacaagacgtttgggtgaaaacgaaaattccatgcaaaatgctccggtttcatgtcatcaaaatgatgacgtaattaagcattgataattgagatccctctccctgacaggatgattacataaataatagtgacaaaaataaattatttatttatccagaaaatgaattggaaaatcaggagagcgttttcaatcctacctctggcgcagttgatatgtaaggcaggtttattatatcgcgttgattattgatgctgtttttagttttaacggcaattaatatatgtgttattaattgaatgaattttatcattcataataagtatgtgtaggatcaagctcaggttaaatattcactcaggaagttattactcaggaagcaaagaggattacagaattatctcataacaagtgttaagggatgttatttcccgattctctgtggcataataaacgagtagatgctcattccatctcttatgttcgccttagtgcctcataaactccggaatgacgcagagccgtttacggtgcttatcgtccactgacagatgtcgcttatgcctcatcagacaccatggacacaacgttgagtgaagcacccacttgttgtcatacagacctgttttaacgcctgctccgtaataagagcaggcgtttttttatgtatcaggaaggccccggaggtgcttgcctccgggtgagaaggaactactgtggcgggttattctgcaacgttaacatcaaaccgtcgcgacgcatcgctgcagcttcttccggcttgtgcagtctgtccagcgcgtcggcaagccatgcgtaatcgtaggcgtccggacgttgtttcagcgctgcgcggaaggcgagcgatgcttcctgccattctccgtgcttcatcagtgactggcccagtgtgctccacaacagcgggcgatcgccgacgtttttgatttgctggcgcagcactttttccagctgttccggattgtttgttttcagtcgaggaatcggcagcagtaggcgatcgtcgtactggcgtttcaggccatcgatgataatttgctgggcagtatcatgatcgtcacattcaataagatgttccgccattgccacctgcaacgctacctgatgacgcgttttccggctttggtttttccaccagttacgcaaaccttcgctaccgttatcggcacgcgcctgatccatcaggccaatccatgcctgttgttccagcattgcacgatgttcttcatcaccaacatgggctttcgccattgatgggataatatccagcagcgaactccatgcacctgtgcggatatacgcctgttccgccagacgtaatacttccggatggcgtggcgtaacttccagcagcttatccacgccgtggcgtgcagcatggttttcattacgggccagttgcagacgtacgcgggtgatttctaccggaatggtgtcgttgccggccagctccgctgcgcgttccagatgttggttggcgcgtgcttcatcaccacgttgttgcgcggcttcggcagccagtagatagttcaccaccggttgttccgcgtgatcggcatttttcgccatcagcttttcaacttgctgataatcgccttccgccagtttcagcagcgcctgttcggtctgcttacgtgcacggcgacgcttacgtccgacaaaccacccacgggtgtgcgcgccagtgcggaagatccgccgcagtagccactcaatggcaaacagcactaccatcgccagaatcaatatgatcgccaggcccgtgacgctggtttcgatattgtagttgtcggtctggatcagcacataaccctgatggccggcaatcatcgggccaaccacgatccccgcaatcagcaacacaaagagcaataacacttttagcatggttattctccttgcggcgcggctgccggagtatcagcttgcggtgcaggtgcaggtgcaggtttagcttccgttgtccccgctgccggttgtgccagcaggttacgcacgcgagtctgcatcagtttttccagcatcgcctggctttgcagggtttccggaagatccatcgagatattttgctggcttaactggtccacctcgtcgaggaacgctttggtggtggcatcatcagtatcgtagtaagcacgtacccaggtggagacgttctccagcgcctggcgataagtctcttcctggtgacgcggtacagcttgtgctgcgaccagcaggcgagagcgaatattttcgcgcagatagatatcctgatttggcgctaacagcggtacggcggtgtcatcacgacggcgaatcgtaatgaagttgtccataaagttctgccagcttttttgcagattgatacgccattcgctgatggaactggaaagctcttcaccgtctgaatccatcggcgaaccatcgctgtcattatcggccagacgcaggttatctacctgatttgaaagctgattaagcttaaggatgatgccgtcataatccacctgcgatactgcagaaaggctggcgatatcatcggtaattgcccgacgaacggtaatcagactcgggtcattcatatccgccaggctggcgtctgcacttttcagcaacgctgcagcggtcgtgacgtcctgatcgctccacagcttccgtccggcgagtttcaccagaaaatcggcctgagccagcagccaggttttagcatcgctgccggaaatggtggcgaccttttgttggacttcatccaactgttttgccagcgtttcttgctgacgattcgcctgcttaagttgtgcagcttgttgcttaataatgccttccagctcggctttttggctctcctgggctttttgcaatgccgtcagttggttagccagggcatcgctggtggcggtctgattgacggcctgttgtttaccccagccatacaaaccgatgcccgccgccagagcaatagcgatagccaccgcgctgagaatcaatgcggtattgttcttactctttttttctgttgcgacaggttgtgacgtggtgtccacggcctccctggtctcttcaaccacggcggaggttttttcttgttccgtcattatggcttcctgttatgagagttattgtaatgcccgtaaaagcgcatcgttgtcagcgttatcggcgaccttaatgtcttgccagcccagttcccgggcgagtttcgccaaacgctcactgacgaccaatagtcgacagtgtagtaaccagtgctcacgataccattgtgggatcagcgaccagagttgctgcaacatttcaccgctggtaacaacgaccatcgtcacctcgcgggcttgccagcgcatcgcttcttctgcaccatcgtaatggattgcgcatcgttgataacattcacaaaaagtgacctcagcaccgcgcgccgtcagggtatccccaattagctcacgaccaccattgccacgtaatatcagcgcacgtttgcccgcaatattttgtaattcaggtaattgtagcaagacttcgctgatttcccgatcctgcgggtagagaatcttctgtccgcttacggtatgtagtgccagtgcggtggtgcgtccaatggcgaaataatcaggtagtcggggccatttacgatcttgctgatgcagctgtgattgggcaaaagcaaccgcgtgttgcgagagggcaaacaacagatcgctctcccccagcgctgccagttgatcagcaagttgcggtaattgttgacccggagaaaactcaatcagcggaaaatgccaggccacctgccccagtgtgcgcagacggctcactaactcttctccagcgggagacgggcgggtgacaaggatactcatgccggggcgtctccgttatagacttcagcgaggatctcgcgcgcgccgttattcagtagctcttctgccagcgaaatccccatttgttcggcatcttgcggcgcaccgcggcgttcaccgcgaataatctgcgaaccgtccggcgcgccgaccagcgcacgcagccagatttcgccatcaataagctcggcgtagctaccaattggcacctgacatccgccttcgagacgggtattcatggcgcgttctgcggtaacgcgcagtgcagtttcgtggtgattcagcgcggcaagcagctcgcgagtgcgtgaatcatcaaggcggcattcaatacccaccgcaccttgtcctaccgccggaagagaaatctcgggtggcaacgcggcgcgaatacgtgactccagacctaaacgttttagtccggctacggcaagaatgatggcatcgtattcgccgttatccagtttgctcaggcgagtgccgacgttgccgcgcagggagcggataatcagatccggacggcgttcagccagttggcactggcgacgtaaactggacgtcccgacgatactgcctgccggtaacgcatccagactgtcatagttattggacacaaaggcatcgcgaggatcttcacgctcacaaatagtgaccagtcccagaccttgcgggaattcaaccggcacatctttcattgagtgtacggcgatatcggcgcgattttcgaggagcgcgacttccagctcttttacaaataagccttttccgcctactttcgccagcggcgtatcaagaatcacatcgccgcgcgtcaccatcggtaccagttcaacgaccaggcccggatggctcgccatcaacttgtctttgacatagtgtgcctgccagagtgcaagtgggctttggcgtgtggcaattcttaaaacattgtctaacatgcttgttaccgtcattatcatccgtggtccatcctaacatccttgccagagtgatgtcagtgttgtggtgaaacgtagacgcctgcgcaaaccgtaaaatgaggtctggcagtggatcctgacaggcgtttcacgccgttgtaataaggaatttacagagaataaacggtgctacacttgtatgtagcgcatctttctttacggtcaatcagcaaggtgttaaattgatcacgttttagaccattttttcgtcgtgaaactaaaaaaaccaggcgcgaaaagtggtaacggttacctttgacatacgaaatatcccgaatgccgcgtgttaccgttgatgttggcggaatcacagtcatgacgggtagcaaatcaggcgatacgtcttgtacctctatattgagactctgaaacagagactggatgccataaatcaattgcgtgtggatcgcgcgcttgctgctatggggcctgcattccaacaggtctacagtctactgccgacattgttgcactatcaccatccgctaatgccgggttaccttgatggtaacgttcccaaaggcatttgcctttacacgcctgatgaaactcaacgccactacctgaacgagcttgaactgtatcgtggaatgtcagtacaggatccgccgaaaggtgagcttccaattactggtgtatacaccatgggcagcacctcgtccgtagggcaaagttgttcctctgacctggatatctgggtctgtcatcaatcctggctcgatagcgaagagcgccaattgctacaacgtaaatgtagcctgctggaaaactgggccgcctcgctgggtgtggaagtcagcttcttcctgattgatgaaaaccgcttccgtcataatgaaagcggcagcctggggggcgaagattgtggctccacccagcatatactgctgcttgacgaattttatcgtaccgccgtgcgtctcgccggtaagcgtattctgtggaatatggtgccgtgcgacgaagaagagcattacgacgactatgtgatgacgctttacgcgcagggcgtgctgacgccaaatgaatggctggatctcggtggcttaagctcgctttctgctgaagagtactttggtgccagcctttggcagctctacaagagtatcgattccccatacaaagcggtactgaaaacactgctgctggaagcctattcctgggaatacccgaacccacgtctgctggcgaaagatatcaaacagcgtttgcacgacggcgagattgtatcgtttggtctcgatccatactgcatgatgctggagcgtgttactgaatacctgacggcgattgaagattttacccgtctggatttagtacgtcgctgcttctatttaaaagtgtgcgaaaagctcagccgtgaacgcgcctgcgtaggctggcgtcgcgcagtgttgagccagttagtgagcgagtggggttgggacgaagctcgtctggcaatgctcgataaccgcgctaactggaagattgatcaggtgcgtgaggcgcacaacgagttgctcgacgcgatgatgcagagctaccgtaatctgatccgctttgcgcgtcgcaataaccttagcgtctccgccagtccgcaggatatcggcgtgctgacgcgtaagctgtatgccgcgtttgaagcattaccaggtaaagtgacgctggtaaacccgcagatttcacccgatctctcggaaccgaatctgacctttatttatgtgccgccgggccgggctaaccgttcaggttggtatctgtataaccgcgcgccaaatattgagtcgatcatcagccatcagccgctggaatataaccgttacctgaataaactggtggcgtgggcatggtttaacggcctgctgacctcgcgcacccgtttgtatattaaaggtaacggcattgtcgatttgcctaagttgcaggagatggtcgccgacgtgtcgcaccatttcccgctgcgcttacctgcaccgacaccgaaggcgctctacagcccgtgtgagatccgccatctggcgattatcgttaacctggaatatgacccgacagcggcgttccgcaatcaggtggtgcatttcgatttccgtaagctggatgtcttcagctttggcgagaatcaaaattgcctggtaggtagcgttgacctgctgtaccgcaactcgtggaacgaagtgcgtacgctgcacttcaacggcgagcaatcgatgatcgaagccctgaaaactattctcggcaaaatgcatcaggacgccgcaccgccagatagcgtggaagtcttctgttatagccagcatctgcgcggcttaattcgtactcgcgtgcagcaactggtttctgagtgtattgaattgcgtctttccagcacccgccaggaaaccgggcgtttcaaggcgctgcgcgtttctggtcaaacctgggggttgttcttcgaacgcctgaatgtatcggtacagaaactggaaaacgccatcgagttttatggcgcgatttcgcataacaaactgcacggcctgtcagtgcaggttgaaaccaatcacgtcaaattaccggcggtggtggacggctttgccagcgaagggatcatccagttctttttcgaagaaacgcaagacgagaatggctttaatatctacattctcgacgaaagcaaccgggttgaggtatatcaccactgcgaaggcagcaaagaggagctggtacgtgacgtcagtcgcttctactcgtcatcgcatgaccgttttacctacggctcaagcttcatcaacttcaacctgccgcagttctatcagattgtgaaggttgatggtcgtgaacaggtgattccgttccgcacaaaatctatcggtaacatgccgcctgccaatcaggatcacgatacgccgctattacagcaatatttttcgtgatgaacgtgccggaaagcgaggcttatccggcatgcaatcttagcggaaactgactgtttcacccgcctgctgcgtcgccgcctgttccagcaaatcccagaaggtttcgccgctgcgatcacaaatccactcatcgcctttcaggtcaaaatggtagccgccctgtttggttgccagccatacctggtgcagcggctcctggcggttgataatgattttgctgccattctcaaaggtaatggtcagtacgccgccgttgatttcgcagtcgatatcgctgtcgccatcccagtcgtccaggcgttcttcaatggtcagccagagttgatcagccaggcgatgaaattcactgtcgttcattgttgtatcctgtttttaagtgatggcggcagtatagcggcatggggtcagggcttcaaagtttgcacctctgcggctgcgttccggcacgattcatccgtcaccggaataatgatgtctctgtgtagcgaaagatttgtctcttcattagggcgcagttacaccacgtctttccctgtttctggtaaacattatgatcaggtttaccgagcgagcatcctcacgctgacggaactaaaaaagacaacaaacaaaccacattgcgatagtgcataaagccatcctggcgcgaggtgccgatcacgaaactaccagcaaaacataaatccccacgagtaagcgttatactcgcagcatttcctcacttttcagacttcataaagagtcgctaaacgcttgcttttacgtcttctcctgcgatgatagaaagcagaaagcgatgaactttacaggcaatccataatgaaaaacgtgtttaaggcactcactgtattacttactctcttcagcctgacgggctgcggtctgaaaggtccgctctatttcccgcctgcagataaaaacgcaccgccgccgaccaaaccggtagagacgcaaacgcaatccacggtgccggataaaaacgatcgcgccactggcgatggtccatcccaggtgaattactaaaagtcagtttctgtacccgcgtgattggagtaaatgatgcagttctcgaaaatgcatggccttggcaacgattttatggtcgtcgacgcggtaacgcagaatgtctttttttcaccggagctgattcgtcgcctggctgatcggcacctgggggtagggtttgaccaactgctggtggttgagccgccgtatgatcctgaactggattttcactatcgcattttcaatgctgatggcagtgaagtggcgcagtgcggcaacggtgcgcgctgctttgcccgttttgtgcgtctgaaaggactgaccaataagcgtgatatccgcgtcagcaccgccaacgggcggatggttctgaccgtcaccgatgatgatctggtccgcgtaaatatgggcgaacccaacttcgaaccttccgccgtgccgtttcgcgctaacaaagcggaaaagacctatattatgcgcgccgccgagcagacaatcttatgcggcgtggtgtcgatgggaaatccgcattgcgtgattcaggtcgatgatgtcgataccgcggcggtagaaacgcttggtcctgttctggaaagccacgagcgttttccggagcgcgccaatatcggttttatgcaagtggttaagcgcgagcatattcgtttacgcgtttatgagcgtggggcaggagaaacccaggcctgcggcagcggcgcgtgtgcggcggttgcagtagggattcagcaaggtttgctggccgaagaagtacgcgtggaactccccggcggtcgtcttgatatcgcctggaaaggtccgggtcacccgttatatatgactggcccggcggtacatgtctacgacggatttattcatctatgaagcaaccaggggaagaactgcaggaaacactcacggagcttgatgaccgggcggttgtcgattatctgattaaaaatcctgagttttttatccgtaatgcgcgcgcagtagaagcgatacgtgtgccgcatccggtacgcggcaccgtttcgttggtcgagtggcacatggcccgcgcacgtaatcatattcatgttctggaagagaacatggcgctgttgatggaacaggctatcgccaacgaaggcctgttttatcgcctactctacctgcagcgcagtctcaccgccgccagcagtctcgacgatatgctgatgcgctttcaccgctgggcgcgcgatctcggcctggcaggtgcgagtctgcgcctgtttccggatcgctggcgcttaggtgcgccgtcgaaccacactcatctggcattaagccgtcagtctttcgaaccgctgcgtattcagcgtttggggcaggaacagcactatcttgggccgcttaacggaccagagctgctggtggtgctaccggaagcgaaagcggtgggatcggtggcgatgtcgatgctgggaagcgatgctgatttgggtgtcgtgctgtttaccagtcgcgatgccagtcactatcaacaagggcaaggaacgcagttacttcatgaaattgcgctgatgttgccggagcttctggagcgttggattgaacgcgtatgaccgatttacacaccgatgtagaacgctacctacgttatctgagcgtggagcgccagcttagcccgataaccctgcttaactaccagcgtcagcttgaggcgatcatcaattttgccagcgaaaacggcctgcaaagctggcagcaatgtgatgtgacgatggtgcgcaattttgctgtacgcagtcgccgtaaagggctgggagcagcaagtctggcgttacggctttctgcgctacgtagcttttttgactggctggtcagccagaacgaactcaaagctaacccggcgaaaggtgtttcggcaccgaaagcgccgcgtcatctgccgaaaaacatcgacgtcgacgatatgaatcggctgctggatattgatatcaatgatcccctcgctgtacgcgaccgtgcaatgctggaagtgatgtacggcgcgggtctgcgtctttctgagctggtggggctggatattaaacacctcgacctggagtctggtgaagtgtgggttatggggaaaggcagcaaagagcgccgcctgccgattggtcgcaacgctgtggcgtggattgagcactggcttgatttgcgcgacctgtttggtagcgaagacgacgcgctttttctgtcgaaactgggcaagcgtatctccgcgcgtaatgtgcagaaacgctttgccgaatggggcataaaacaagggctgaataatcacgttcatccgcataaattacgtcactcgttcgccacgcatatgctggagtcgagcggcgatcttcgtggtgtgcaggagctgctgggtcatgccaacctctccaccacgcaaatctatactcatcttgattttcaacaccttgcctcggtgtacgatgcggcgcatccacgcgccaaacgggggaaataatgcgtttttaccggcctttggggcgcatctcggcgctcacctttgacctggatgataccctttacgataaccgtccggtgattttgcgcaccgagcgagaggcgcttacctttgtgcaaaattatcatccggcgctgcgcagcttccagaatgaagatctgcaacgcctgcgccaggcggtacgggaagcggaacccgagatttatcacgacgtgacgcgctggcgttttcgttcgattgaacaagcgatgctcgacgccgggctgagtgccgaagaagccagtgcaggcgcacacgcagcaatgatcaactttgccaaatggcgcagccgaatcgacgtcccgcagcaaactcacgacaccttaaaacagctggcgaagaaatggccgctggtggcgatcaccaacggtaacgcccagccggagctgtttggtttgggggattattttgagtttgtgctgcgcgctggcccgcacgggcgctcaaaaccgttcagcgatatgtactttttggctgcggaaaaactcaacgtgccgatcggcgagatcttacatgttggggacgatctcaccactgacgtgggtggggcaattcgcagcggaatgcaggcttgttggatcagaccggaaaatggcgatctgatgcaaacctgggacagccgtttactgccgcatctggaaatttcccggttggcatttctgacctcgctgatataatcagcaaatctgtatatatacccagctttttggcggagggcgttgcgcttctccgcccaacctatttttacgcggcggtgccaatggacgtttcttacctgctcgacagccttaatgacaaacagcgcgaagcggtggccgcgccacgcagcaaccttctggtgctggcgggcgcgggcagtggtaagacgcgcgtactggtgcatcgtatcgcctggttgatgagcgtggaaaactgctcgccatactcgattatggcggtgacgtttaccaacaaagcggcggcggagatgcgtcatcgtatcgggcaactgatgggcacgagccagggcggtatgtgggtcggcaccttccacgggctggcgcaccgtttgctgcgtgcgcaccatatggacgccaatctgccgcaggatttccagatcctcgacagtgaagaccagctacgcctgcttaagcgtctgatcaaagccatgaacctcgacgagaagcagtggccgccgcggcaggcaatgtggtacatcaacagccagaaagatgaaggcctgcgtccgcatcatattcaaagctacggtaatccggtggagcagacctggcagaaggtgtatcaggcgtatcaggaagcgtgtgaccgcgcgggcctggtggacttcgccgagctgctgctgcgcgctcacgagttgtggcttaacaagccgcatatcctgcaacactaccgcgaacgttttaccaatatcctggtggacgaattccaggataccaacaacattcagtacgcgtggatccgcctgctggcgggcgacaccggcaaagtgatgatcgtcggtgatgacgaccagtcaatctacggctggcgcggggcgcaggtggagaatattcagcgtttccttaatgatttccccggtgccgaaactattcgtctggagcaaaactaccgctctaccagcaatattctgagcgccgctaacgccctgattgaaaacaataacgggcgtctgggtaaaaaactgtggaccgatggcgcggacggtgagcctatttccctctattgcgcttttaacgaactcgatgaagcgcgttttgtggttaaccgcatcaaaacctggcaggacaacggcggagcgcttgccgagtgcgccattctctaccgcagcaacgcccagtcgcgggtgctcgaagaggcgttattgcaggccagtatgccgtaccgtatttacggcgggatgcgcttcttcgaacgccaggaaatcaaagatgcgctctcgtatctgcgcctgattgccaaccgcaacgacgacgcggcctttgagcgtgtggtgaatacgccaacgcggggtattggtgaccggacgctggacgtggtacgtcagacatcgcgcgatcgccagttaacactctggcaggcatgtcgtgagctgttgcaggaaaaagccctcgccgggcgagctgccagcgccttgcagcgatttatggaattaatcgacgccttagcgcaggaaactgccgatatgccgctgcatgtacagactgaccgggtaattaaagactccggcctgcgtaccatgtatgagcaggagaagggcgaaaaaggtcagacgcgtatcgaaaacttagaggaactggtgacggcaacgcgccagttcagctacaacgaagaagacgaagatttaatgccgctgcaggcgttcctctcccatgcggcactggaagcaggtgaagggcaggcggatacctggcaggatgcggtgcagttgatgacgctacactcggcgaaaggcctggagttcccgcaggtgtttatcgttggtatggaagagggcatgttcccaagccagatgtcgctggatgaaggcgggcgtctggaagaagaacgccgtctggcctacgttggcgtaacccgcgcgatgcagaaactgacgctgacctacgcggaaacccgccgtctgtatggtaaagaggtttaccatcgcccgtcgcgctttatcggcgagctgccggaagagtgtgtggaagaggtgcgcctgcgcgccacggtaagccgcccggtcagccatcagcggatgggtacgccgatggtcgagaacgacagcggctacaagctcggccagcgcgtacgccacgctaagtttggtgaaggcaccattgtcaatatggaaggcagcggtgagcatagccgtttgcaggtggcatttcagggccagggtattaaatggctggtggcggcatacgcccggctggagtcggtgtaacgttgccggatgcggtgctgcgcaccttatttggcctaaaaaatcattcagattcaataaattgcaacgtcatgtaggccggatagggcgtttacgccgcatccggcatctgcgccatcttcagtatctgacacaaaactatcgttttaacctttccgctcgacggaaatcatggtgacaaaaggatagcgttgccacgggattgccccgcctttcatatacatatgtgaaatcgtgccatcaagataaagcagctgctcaacgttcagtttcgctttggcataacaggcaaaatcataaaaatttgttgcctgctggctcaacaaaaacacggcgttcccatgtttattaatcccaacaccgttacgaattttgcttgaggcgacgttgggatgaatacgcggattaattacaccgttttccatcaacattggccctgactgcaccgcaaactgaatctctttactggttttgaaggcatccagacgaacgatgccgactttatctcccgcgacataaaacacgccgccaggacggataaagaaattcccttcacctgaagcgagatttaacgccaccttctgctgaccgttttcgatgtacaaaccgagcggcgcatagctttcatcatagatgccgccgttcatcgccatctgcacctgaccctgactattaatatccgccagcagagcatgtaacgttccccacgcttcgccattggctttttgccagtacattttcacccgctctgtttgaggattaacggtatacgcctgtacggtcagcgtcggatctgagagtgcgcaatcatcagcggcaacagcaaacaagggaagtaaggtgagggcgagaaaaatccgtttgagattcaaggtgatcattcctttaccaatgagtagctgatgcgccattataggtcctggatgtgggatttttttatcctgttagcgaccttgacgagtaccaaaaagcgcgaagttcaactattgttctgtggtgttctgttgcgtgttgacggcaaaattttgctggcgtaacatgcgcgcacgatcactctaagaggacattcgccttggacacacccagtagatactggctcactatcctgtcatccaggatcaactcctaaggctatccctttttgctgatagccttagcggttgtcagcgacctcaatttttcccgtcgcgctgagtcaggctgtttaatggtctgaaacccaatttgtttctgtgtgcccaccgaactgtccgatattttaagcattgggagtcccggtcatgctgagcgcatttcaactggaaaataaccgactgacccggctggaagtcgaagagtcacaaccccttgtaaatgcagtatggattgatcttgtcgaaccggacgacgacgagcgactgcgcgtacaatctgaacttggccagagcctggcaacccgcccggaactggaagacatcgaagcatcggcacgtttctttgaagacgacgacggcctgcatattcactccttcttcttctttgaagatgcggaagatcacgccggtaactccactgtggcatttaccatccgtgatggtcgtctgtttactctgcgtgagcgtgaactgcccgcttttcgtctgtatcgtatgcgtgcccgtagccagtcgatggtagacggtaacgcctacgagttgctgctggatctgttcgaaaccaaaatcgaacagttggcagatgaaattgaaaatatctatagcgacctggagcagttgagccgggtgattatggaagggcatcagggcgatgagtacgacgaggcgctctccactctagcggaactggaagatatcggctggaaagttcgcctgtgtctgatggatacccagcgcgcgctcaacttcctggtgcgtaaagcgcgtttaccgggtgggcaactggagcaggcgcgtgaaatcctgcgagatatcgaatccctgctgccgcataacgaatccctgttccagaaggtgaacttcctgatgcaggcggcaatgggttttatcaacatcgagcagaaccgcatcatcaaaatcttctcggtggtatccgtggtattcctgccgccgacgctcgttgcttccagctatggcatgaactttgagtttatgccagaactgaagtggagcttcggctaccctggcgcgattatctttatgatcctcgcgggcctggcaccgtatctgtactttaagcggaagaactggttgtaaaaaacgagagcggtggcttagtctggctaagccacctgttattcaaaggctccaggtatttaacccttttacctctttctcatagaaccatttgttcgtgttaacagcaacataggctgctacggcaattcccagaatgttaacgccaattagtgcaccaacaaatagagatagaataccaagtaatagaactataattgcttttttccataaccccaggacaaataaatatatccaggaacagaagaaagcaatgaaattcatttgaatagttaagcgttgtcttacttttaatgctttaaatgctgctttatattctggtgttgccccccagaatccaggaaaaccatgttgatcataaaaattaaatcggtatttccatttttcacttaatgaaccatcgttcatatattccttactcataaatactccataactattgttttgatgaatcagtaggtgcaagcattagcatactgaaagtggaaaaataacaaatcaaaaaaatcatcgaaccattgcctgaacaggcaaaatcttcggctatcattgtgatgatagagatgatatatactgctaatgtaccaaaaacataagtttttatatagatgaaaccactatcacggagtcgctggcaattcatgttgatgacgagataatggagtacgatggtagagactataacaagaaagcctgcttctccatcgttaaaaaagataataagaaaggcaaaaatgaaatttattaaaataaatgaaaatatataacgacgtctggaaatcttaccgttagatgttgggataaatatacgtaacataaattttacatccttgtatgagtctccggtcagcatggcaatatgcccactctcatgcaagagtcggcatattttttcagaatatatttattttttatttggacgttctacgctgcgtataaatcgcatccatcacaaaaattgccagcgccacccaaataaaggcgaaagtcaccatcttatcggcacccggtttttcaccataaaacgtcacagccagcaggaacatcagcgtcgggccaatgtactggaaaaagcctaacgttgagagacgcaagcgcgtggcagcggcggtaaaacacaacagcggtacggtagtgacaataccggcggcgatcagcagtaaattcagcgacatcgggttttgccccatatggctggttgagctgtcggcaatagcaaacaggtaaattgccgccacgggcagcagccacatggtttcgattaacatgccggtttgcgcttcaacggcaatcttcttgcgtaccagaccgtagaaggcaaaactaaatgccagtcccagcgcgataataggtagcgaaccaaaagtccacagctggactaacacgccacatatcgccagaatcaccgccagccattgcatccggcggaatcgctcgccgaggaaaatcatccccagcacaatgttcaccagcgggttaataaagtaaccaaggctcgcttccagcatatggtgattgttcaccgcccagataaacagtagccagttgccaccaatcagcacggcagagactgccagcataaaaattttctgtggcgtctgaatcagcgtttttaaataggaccactggcggcaaatgctcatcagcaccaccataaagaaaaacgaccagatcacgcgatgcgtcaggatttcatcggcgggcacgtagtaaatcaacttgaagtacgctggcgctataccccaaataaaataagcggcaagagcgagtaatacgccctgccgcgtttgttttgcatccatcgggaatactcatttttaattggtaacagcagtttacctgcttttatgtcttcaacctaccatataggtggcggtggcactggcaatataaagctgttcttcattgtgtaattcaacgcgggcgacggcgactttattgcctgcacgcaacaggctactagtagcagtaaaacgctcgcccctgcctgggcgcagataatcaacgcgaagatcaatggtccccatccgcgatagccgctggcgtagttcatcttcactgatggtttcgtggcgggttaaggtacttcccacgcacaccagaccggcggcgacatccagcgccgacgcaatgaccccgccgtgcaaaatgctttgcgcccagttgcccaccatcattggctgatttttaaaggccagctgtgcgaactctttttcgtaacgctccagttccatccccaatgcgcggttaaatggcatgtgataaacaaacatctcacccactaatttcagggcttgttcagcggtcagtacggcagacatatcatccttacacttcattggttaatgaaatgttgattttatgcttctttgttgttggtttctactttaggaagggataactaacggctatggagttaagtatgtaaaatagcccgcagaaaaatattcaccttatcaataattcgttacggagaacacgaccgatgcggactctgcagggctggttgttgccggtgtttatgttgcctatggcagtatatgcacaagaggcaacggtgaaagaggtgcatgacgcgccagcggtgcgtggcagtattatcgccaatatgctgcaggagcatgacaatccgttcacgctctatccttatgacaccaactacctcatttacacccaaaccagcgatctgaataaagaagcgattgccagttacgactgggcggaaaatgcgcgtaaggatgaagtaaagtttcagttgagcctggcatttccgctgtggcgtgggattttaggcccgaactcggtgttgggtgcgtcttatacgcaaaaatcctggtggcaactgtccaatagcgaagagtcttcaccgtttcgtgaaaccaactacgaaccgcaattgttcctcggttttgccaccgattaccgttttgcaggttggacgctgcgcgatgtggagatggggtataaccacgactctaacgggcgttccgacccgacctcccgcagctggaaccgcctttatactcgcctgatggcagaaaacggtaactggctggtagaagtgaagccgtggtatgtggtgggtaatactgacgataacccggatatcaccaaatatatgggttactaccagcttaaaatcggctatcacctcggtgatgcggtgctcagtgcgaaaggacagtacaactggaacaccggctacggcggcgcggagttaggcttaagttacccgatcaccaaacatgtgcgcctttatactcaggtttacagcggctatggcgaatcgctcatcgactataacttcaaccagacccgtgtcggtgtgggggttatgctaaacgatttgttttgatgaacggttgagtggttggcaaatctggaatccagcatccaggattaccctctcagagactaaaagcattgcagtttctcgcgcaggcgctgaaaatagcgcctgtttttatttcaggcaatcggggtgaatgtggcgcaggcggaagtgttgaatctggagtccggagctaaacaggttttacaagaaacctttggctaccaacagtttcgccccggccaggaagaaattatcgacactgtgctttccggccgcgattgcctcgtcgtcatgcccactggtggcggaaaatccctttgctatcaaatccctgccttattgctaaacggccttaccgtggttgtttcaccgctgatttcgttgatgaaagatcaggtggatcaactgcaagccaacggcgtggcggcggcgtgccttaactcgacgcaaacccgcgaacagcaacttgaagtgatgacaggctgccgcaccgggcaaattcgtctgctttatatcgccccggaacgcctgatgctggataactttcttgagcatctggcgcactggaatccggtgttattagccgttgatgaagcgcactgtatctcccaatggggccacgatttccgcccggaatatgccgcgctcggtcagttgcgccagcggttcccgacgctgccgtttatggcgctgaccgccacagccgacgacaccacgcgccaggatatcgtgcgcctgctggggctgaacgatccgctgattcaaatcagcagttttgaccgtccgaatattcgctacatgctgatggagaagttcaaaccgctcgatcagttgatgcgctacgtgcaggaacagcgcggtaagtcaggcattatctactgcaacagccgcgcgaaagtagaagacaccgctgcgcgcctgcaaagcaagggaattagcgcggcggcctatcatgccgggctggaaaataatgttcgcgccgatgtgcaggaaaaattccagcgcgatgacctgcaaattgtggtggcgacggtggcgttcggcatgggcatcaataaaccaaacgttcgcttcgtggtccactttgatattccgcgcaatatcgaatcctattatcaggaaaccggacgcgccgggcgtgatggcctgcccgcggaagcgatgctgttttacgatccggctgatatggcgtggctgcgccgttgtctggaagagaagccgcaggggcagttgcaggatatcgagcgccacaaactcaatgcgatgggcgcgtttgccgaagcgcaaacttgccgtcgtctggtattgctgaactattttggcgaagggcgtcaggagccgtgcgggaactgcgatatctgcctcgatccgccgaaacagtacgacggttcaaccgatgctcagattgccctttccaccattggtcgtgtgaatcagcggtttgggatgggttatgtggtggaagtgattcgtggtgctaataaccagcgtatccgcgactatggtcatgacaaactgaaagtctatggcatgggccgtgataaaagccatgaacattgggtgagcgtgatccgccagctgattcacctcggcctggtgacgcaaaatattgcccagcattctgccctacaactgacagaggccgcgcgcccggtgctgcgcggcgaatcctctttgcaacttgccgtgccgcgtatcgtggcgctcaaaccgaaagcgatgcagaaatcgttcggcggcaactatgatcgcaaactgttcgccaaattacgcaaactgcgtaaatcgatagccgatgaaagtaatgtcccgccgtacgtggtgtttaacgacgcaaccttgattgagatggctgaacagatgccgatcaccgccagcgaaatgctcagcgttaacggcgttgggatgcgcaagctggaacgctttggcaaaccgtttatggcgctgattcgtgcgcatgttgatggcgatgacgaagagtagtcagcagcataaaaaagtgccagtatgaagactccgtaaacgtttcccccgcgagtcaaatgtatgttgatgttatttctcaccgtcgccatggtgcacattgtggcgcttatgagccccggtcccgatttcttttttgtctctcagaccgctgtcagtcgttcccgtaaagaagcgatgatgggcgtgctgggcattacctgcggcgtaatggtttgggctgggattgcgctgcttggcctacatttgattatcgaaaaaatggcctggctgcatacgctgattatggtgggcggtggcctgtatctctgctggatgggttaccagatgctacgtggtgcactgaaaaaagaggcggtttctgcacctgcgccacaggtcgagctggcgaaaagtgggcgcagtttcctgaaaggtttactgaccaatctcgctaatccgaaagcgattatctactttggctcggtgttctcattgtttgtcggtgataacgttggcactaccgcgcgctggggcatttttgcgctgatcattgtcgaaacgctggcgtggtttaccgtcgttgccagcctgtttgccctgccgcaaatgcgccgtggttatcaacgtctggcgaagtggattgatggttttgccggggcgttatttgccggatttggcattcatttgattatttcgcggtgatgccagacgcgtcttcagagtaagtcggataaggcgtttacgccgcatccgacattatttttcacgcatgcctcgccgatgctaacagcgctcccaccagcataaacaacgagccgaaaatcttattcagcgccttcatctgctttggtcctttaatccatagagcaatccgttgagcaagggtggcgtaaccgatcatcacaataatatcgaccacaatagtggtgacgccgagcacgatatactgcatcagttgcggctgttgcggcatgatgaattgcggaaatagcgccgccagaaacacaatacttttgggattggtgagattcacaaaaactgcgcgctggaacaaatgtcgacgcgattgagtagaggccagcgatttaaggtcaattgcaccagcggcgcgccactgctggattcccagccaaatcaagtaagccgcgcctgcccacttcaacacttcaaacgcaatcactgagcgggaaaatagcgtccccaaccccacgccaaccagcacaatatgaatcgccagtccggtctgaagcccagcaatagacgccaccgcgccgcgataaccgtggttgagcgaggtggtcatagtgttgattgcaccagagcctggcgacaggcttaaaatgatcgatgtcagcaggtaggcaaaccaccattctaaggtcatgatgaactcccggtgtgtctatttttgtgccacaatacgctactgtcgcagcgttgtgtcaggcacgctaaaaaaaacgattttacgtggtttaagaggcagattacccgatgtttcagcagcaaaaagactgggaaacaagagaaaacgcgtttgctgcttttaccatgggaccgctgactgatttctggcgtcagcgtgatgaagcagagtttactggtgtggatgacattccggtgcgctttgtccgttttcgcgcacagcaccatgaccgggtggtagtcatctgcccggggcgtattgagagctacgtaaaatatgcggaactggcctatgacctgttccatttggggtttgatgtcttaatcatcgaccatcgcgggcagggacgttccggtcgcctgttagccgatccgcatctcgggcatgttaatcgctttaatgattatgttgatgatctggcggcattctggcagcaggaggttcagcccggtccgtggcgtaaacgctatatactggcacattcgatgggcggtgcgatctccacattatttctgcaacgccatccaggtgtatgtgacgccattgcgctaactgcgccaatgtttgggatcgtgattcgtatgccgtcatttatggcacggcagatcctcaactgggccgaagcgcatccacgtttccgtgatggctatgcaataggcaccgggcgctggcgcgcgttgccgtttgctatcaacgtactgacccacagcagacagcgatatcgacgtaacttacgcttctatgctgatgacccaacgattcgcgtcggtgggccgacctaccattgggtacgcgaaagtattctggctggcgaacaggtgttagccggtgcgggtgatgacgccacgccaacgcttctcttgcaggctgaagaggaacgcgtggtggataaccgcatgcatgaccgtttttgtgaactccgcaccgccgcgggccatcctgtcgaaggaggacggccgttggtaattaaaggtgcttaccatgagatcctttttgaaaaggacgcaatgcgctcagtcgcgctccacgccatcgttgattttttcaacaggcataactcacccagcggaaaccgctctacagaggtttaaatttcttatgtaccaggttgttgcgtctgatttagatggcacgttactttctcccgaccatacgttatccccttacgccaaagaaactctgaagctgctcaccgcgcgcggcatcaactttgtgtttgcgaccggtcgtcaccacgttgatgtggggcaaattcgcgataatctggagattaagtcttacatgattacctccaatggtgcgcgcgttcacgatctggatggtaatctgatttttgctcataacctggatcgcgacattgccagcgatctgtttggcgtagtcaacgacaatccggacatcattactaacgtttatcgcgacgacgaatggtttatgaatcgccatcgcccggaagagatgcgcttttttaaagaagcggtgttccaatatgcgctgtatgagcctggattactggagccggaaggcgtcagcaaagtgttcttcacctgcgattcccatgaacaactgctgccgctggagcaggcgattaacgctcgttggggcgatcgcgtcaacgtcagtttctctaccttaacctgtctggaagtgatggcgggcggcgtttcaaaaggccatgcgctggaagcggtggcgaagaaactgggctacagcctgaaggattgtattgcgtttggtgacgggatgaacgacgccgaaatgctgtcgatggcggggaaaggctgcattatgggcagtgcgcaccagcgtctgaaagaccttcatcccgagctggaagtgattggtactaatgccgacgacgcggtgccgcattatctgcgtaaactctatttatcgtaatcgttctttatttggtcagttgtcaacctgatacttcgctacaatggatacccgttaatcaaagagttttccattgtggcgctacttatcatcaccacgattctgtgggccttctcctttagcttttatggcgagtaccttgcggggcacgtcgatagctattttgcggtgctggtgcgcgttggcctggcggcactcgtttttctgccgtttctgcgtacccgtggcaatagcctgaaaacggtcggcctgtatatgctggtgggcgcgatgcagcttggcgtgatgtatatgctgagtttccgcgcttatctctacctgacggtttccgagctgctgctgttcaccgtgctgacgccgctctacatcacgctgatttatgacatcatgagtaagcgccgtctgcgctggggctatgcctttagcgccttgctggcggtgattggtgccgggattattcgctatgatcaggtcaccgaccatttctggactggcttgctgctggtgcaactctccaatatcacttttgccattggcatggtgggttacaaacgcctgatggaaactcgcccgatgccacagcataacgcctttgcgtggttctatcttggcgcgtttctggtggcagtgattgcatggttcttgctgggaaatgcgcagaaaatgccgcaaaccacgctgcaatggggcattctggtgtttcttggcgtggtggcttccgggattggctactttatgtggaactacggcgcgacgcaggtggacgccggaacgctgggcattatgaataatatgcacgttccggcagggctgctggtaaacctggctatctggcaccaacagccgcactggccaacgtttattacaggcgcgctggtgatcctggcctcactgtgggtgcatcgtaagtgggtcgctccgcgctcttcacaaacggcagatgatcgcaggcgtgattgcgcgctgagcgaataaacgcttccgtaactggctgacgctgctcgccatcgcgcacggcggcgtacagtcggctccacaagccttcgcccagggttttggtcaccaccagaccctggcgctcaaaactctctactacccaatgcggtagcgcggcaatacccatccgcgcggcaaccatctgaatcaacaataaggtgttatcgacgcttttcagtgacgggctgacgcctgccggctgaagaaaatgccgccagacatccagtcgactacgctgcaccggataaattaatagcgtctcgctggcgagatcttccggtgtaattcgcgttttcgccgccagtggatggtcaggtgctaacaccagacgcacttcatagtcgaacatcggcgaataatgcaggccactgcgcggcagaatatcggacgtcattaccagatccagctctccctgttgcaaggcgggctgcgggtcaaatgtcacgcccgatttaaaatccatctctacctgcggccagttcttatggaaattttctaacgcgggtgtcagccactgaatacagctatggcactcaatggcaatgcgcagacgcgtctgctgcggttcattgcaggcttgcagggcctggctaatttgcggcagtacctggtttgccagttgcaacaggatttctccctgcggtgtaaagcgtagcggctggctcttacgcacaaatagccggaagccaaggcgttgttccagatcgctaaactggtgagacagggcggattgcgtctgatgcaacgtcgccgcagcggctgcgagcgagccgcagttccgcaacgcttgtagcgttttcaggtgttttacttcgatcatgaaagtccttcacttcggcatgaataatttgcgcttgaggaatatacagtaaccgccaattatggatgtgtaaacatctggacggctaaaatccttcgtcttttaaatttatggtgcgttggctgcgtttctccaccccggtcacttacttcagtaagctcccggggatgaataaacttgccgccttccctaaattcaaaatccataggatttacatataattagaggaagaaaaaatgacaatattgaatcacaccctcggtttccctcgcgttggcctgcgtcgcgagctgaaaaaagcgcaagaaagttattgggcggggaactccacgcgtgaagaactgctggcggtagggcgtgaattgcgtgctcgtcactgggatcaacaaaagcaagcgggtatcgacctgctgccggtgggcgattttgcctggtacgatcatgtactgaccaccagtctgctgctgggtaacgttccggcgcgtcatcagaacaaagatggttcggtagatatcgacaccctgttccgtattggtcgtggacgtgcgccgactggcgaacctgcggcggcagcggaaatgaccaaatggtttaacaccaactatcactacatggtgccggagttcgttaaaggccaacagttcaaactgacctggacgcagctgctggacgaagtggacgaggcgctggcgctgggccacaaggtgaaacctgtgctgctggggccggttacctggctgtggctggggaaagtgaaaggtgaacaatttgaccgcctgagcctgctgaacgacattctgccggtttatcagcaagtgctggcagaactggcgaaacgcggcatcgagtgggtacagattgatgaacccgcgctggtactggaactaccacaggcgtggctggacgcatacaaacccgcttacgacgcgctccagggacaggtgaaactgctgctgaccacctattttgaaggcgtaacgccaaatctcgacacgattactgcgctgcctgttcagggtctgcatgttgacctcgtacatggtaaagatgacgttgctgaactgcacaagcgcctgccttctgactggttgctgtctgcgggtctgatcaatggtcgtaacgtctggcgcgccgatcttaccgagaaatatgcgcaaattaaggacattgtcggcaaacgtgatttgtgggtggcatcttcctgctcgttgctgcacagccccatcgacctgagcgtggaaacgcgtcttgatgcagaagtgaaaagctggtttgccttcgccctacaaaaatgccatgaactggcactgctgcgcgatgcgctgaacagtggtgacacggcagctctggcagagtggagcgccccgattcaggcacgtcgtcactctacccgcgtacataatccggcggtagaaaagcgtctggcggcgatcaccgcccaggacagccagcgtgcgaatgtctatgaagtgcgtgctgaagcccagcgtgcgcgttttaaactgccagcgtggccgaccaccacgattggttccttcccgcaaaccacggaaattcgtaccctgcgtctggatttcaaaaagggcaatctcgacgccaacaactaccgcacgggcattgcggaacatatcaagcaggccattgttgagcaggaacgtttgggactggatgtgctggtacatggcgaggccgagcgtaatgacatggtggaatactttggcgagcacctcgacggatttgtctttacgcaaaacggttgggtacagagctacggttcccgctgcgtgaagccaccgattgtcattggtgacattagccgcccggcaccgattaccgtggagtgggtgaagtatgcgcaatcgctgaccgacaaaccggtgaaagggatgctgacggggccggtgaccatactctgctggtcgttcccgcgtgaagatgtcagccgtgaaaccatcgccaaacagattgcgctggcgctgcgtgatgaagtggccgatctggaagccgctggaattggcatcatccagattgacgaaccggcgctgcgcgaaggtttaccgctgcgtcgtagcgactgggatgcgtatctccagtggggcgtagaggccttccgtatcaacgccgccgtggcgaaagatgacacacaaatccacactcacatgtgttattgcgagttcaacgacatcatggattcgattgcggcgctggacgcagacgtcatcaccatcgaaacctcgcgttccgacatggagttgctggagtcgtttgaagagtttgattatccaaatgaaatcggtcctggcgtctatgacattcactcgccaaacgtaccgagcgtggaatggattgaagccttgctgaagaaagcggcaaaacgcattccggcagagcgcctgtgggtcaacccggactgtggcctgaaaacgcgcggctggccagaaacccgcgcggcactggcgaacatggtgcaggcggcgcagaacttgcgtcgggggtaaaatccaaaccgggtggtaataccacccggtcttttctcattacagcgacttcttcccaccatactgcttaaaccattccagcatacgctgccagccatcttctgcagatgcggcatgatagctcgggcgataatcagcgttgaatgcatgcccggcgtccgggtacacgataatctctgctttcgcattagcagcccgcagcgcctggcgcatggtttcaacgctctcctgcggaatgctgttatcctgaccaccatataagccgagaatcggcgcgttaagatcggttgcgatatcaacaggttgtttcggtgaattcagcgacttgtcgcccgtcagtttgccgtaccacgccactgcggcttttagctgtggattatgcgcggcatacagccaggtgatacgtccaccccagcagaatccggtgatcattaaacgatgaacatcgccgccgttgcgggaagcccaactggcgacatgatcgagatcggccagcacctgcgagtcaggcacttttgctaccagaccgctaagcaacgtggggatatcggcaaaatcattcggatcgccttcgcggaagtaaagttcaggtgcgatagccagatacccctccagcgccagacggcgacaaatgtcgcggatatgttcatgcacgccaaaaatttcctgcactacaatgaccactggcagtgggccatcgctttgctttggtctggcatggtaagcaggcatgttatccccttgtgaagggatagaggtgaagcccgccacaatcgcgtcgtccggggtctgaacgatggtcgaagcgagaggcgatgcagcaggtgcaaatccagattgttgtgttgttgccatggtattctccgtacccttataaaaatgttgcgcaatgttaactatagtcagcatgcaacaaatcacattgcctgaatcggctcatcttttatgcagtcctgcagaatgaagggtgatttatgtgatttgcatcacttttggtgggtaaatttatgcaacgcatttgcgtcatggtgatgagtatcacgaaaaaatgttaaacccttcggtaaagtgtctttttgcttcttctgactaaaccgattcacagaggagttgtatatgtccaagtctgatgtttttcatctcggcctcactaaaaacgatttacaaggggctacgcttgccatcgtccctggcgacccggatcgtgtggaaaagatcgccgcgctgatggataagccggttaagctggcatctcaccgcgaattcactacctggcgtgcagagctggatggtaaacctgttatcgtctgctctaccggtatcggcggcccgtctacctctattgctgttgaagagctggcacagctgggcattcgcaccttcctgcgtatcggtacaacgggcgctattcagccgcatattaatgtgggtgatgtcctggttaccacggcgtctgtccgtctggatggcgcgagcctgcacttcgcaccgctggaattcccggctgtcgctgatttcgaatgtacgactgcgctggttgaagctgcgaaatccattggcgcgacaactcacgttggcgtgacagcttcttctgataccttctacccaggtcaggaacgttacgatacttactctggtcgcgtagttcgtcactttaaaggttctatggaagagtggcaggcgatgggcgtaatgaactatgaaatggaatctgcaaccctgctgaccatgtgtgcaagtcagggcctgcgtgccggtatggtagcgggtgttatcgttaaccgcacccagcaagagatcccgaatgctgagacgatgaaacaaaccgaaagccatgcggtgaaaatcgtggtggaagcggcgcgtcgtctgctgtaattctcttctcctgtctgaaggccgacgcgttcggccttttgtatttttgcgtagcgcctcgcaggaaatgcctttccaactggacgtttgtacagcacaattctattttgtgcgggtaagttgttgcgtcaggaggcgttgtggatttctcaatcatggtttacgcagttattgcgttggtgggtgtggcaattggctggctgtttgccagttatcaacatgcgcagcaaaaagccgagcaattagctgaacgtgaagagatggtcgcggagttaagcgcggcaaaacaacaaattacccaaagcgagcactggcgtgcagagtgcgagttactcaataacgaagtgcgcagcctgcaaagtattaacacctctctggaggccgatctgcgtgaagtaaccacgcggatggaagccgcacagcaacatgctgacgataaaattcgccagatgattaacagcgagcagcgcctcagtgagcagtttgaaaacctcgccaaccgtatttttgagcacagcaatcgccgggttgatgagcaaaaccgtcagagtctgaacagcctgttgtcgccgctacgtgaacaactggacggtttccgccgtcaggttcaggacagcttcggtaaagaagcacaagaacgccataccctgacccacgaaattcgcaatctccagcaactcaacgcgcaaatggcccaggaagcgatcaacctgacgcgcgcgctgaaaggcgacaataaaacccagggcaactggggcgaggtagtattgacgcgggtgctggaggcttccggtctgcgtgaagggtatgaatatgaaacccaggtcagcatcgaaaatgacgcccgctcgcggatgcagccggatgtcatcgtgcgcctgccgcagggaaaagatgtggtgatcgacgccaaaatgacgctggtcgcctatgaacgctattttaacgccgaagacgactacacccgcgaaagcgcgctacaggaacatatcgcgtcggtgcgtaaccatatccgtttgctgggacgcaaagattatcaacagctgccggggctgcgaactctggattacgtgctgatgtttattcccgttgaacccgcttttttactggcgcttgaccgccagccggagctgatcaccgaagcgttgaaaaacaacatcatgctggttagcccgactacgctgctggtggcgctgcgcactatcgccaacctgtggcgttatgagcatcaaagccgcaacgcccagcaaatcgccgatcgtgccagcaagctgtacgacaagatgcgtttgttcatcgatgacatgtccgcgattggtcaaagtctcgacaaagcgcaggataattatcggcaggcaatgaaaaaactctcttcagggcgcggaaatgtgctggcgcaggcagaagcgtttcgcggtttaggagtagaaattaaacgcgagattaatccggatttggctgaacaggcggtgagccaggatgaagagtatcgacttcggtcggttccggagcagccgaatgatgaagcttatcaacgcgatgatgaatataatcagcagtcgcgctagcccattgggagtagttaagccgggtagaaatctagggcatcgacgcccaatctgttacacttctggaacaattttttgatgagcaggcattgagatggtggataagttacaagaaacgacgcactttggttttcagaccgtcgcgaaggaacaaaaagcggatatggtcgcccacgttttccattccgtggcatcaaaatacgatgtcatgaatgatttgatgtcatttggtattcatcgtttgtggaagcgattcacgattgattgcagcggcgtacgccgtgggcagaccgtgctggatctggctggtggcaccggcgacctgacagcgaaattctcccgcctggtcggagaaactggcaaagtggtccttgctgatatcaatgaatccatgctcaaaatgggccgcgagaagctgcgtaatatcggtgtgattggcaacgttgagtatgttcaggcgaacgctgaggcgctgccgttcccggataacacctttgattgcatcaccatttcgtttggtctgcgtaacgtcaccgacaaagataaagcactgcgttcaatgtatcgcgtgctgaaacccggcggccgcctgctggtgcttgagttctcgaagccaattatcgagccgctgagcaaagcctatgatgcatactccttccatgtgctgccgcgtattggctcactggtcgcgaacgacgccgacagctaccgttatctggcagaatccatccgtatgcatcccgatcaggataccctgaaagccatgatgcaggatgccggattcgaaagtgtcgactactacaatctgacggcaggggttgtggcgctgcatcgtggttataagttctgacaggagaccggaaatgccttttaaacctttagtgacggcaggaattgaaagtctgctcaacaccttcctgtatcgctcacccgcgctgaaaacggcccgctcgcgtctgctgggtaaagtattgcgcgtggaggtaaaaggcttttcgacgtcattgattctggtgttcagcgaacgccaggttgatgtactgggcgaatgggcaggcgatgctgactgcaccgttatcgcctacgccagtgtgttgccgaaacttcgcgatcgccagcagcttaccgcactgattcgcagtggtgagctggaagtgcagggcgatattcaggtggtgcaaaacttcgttgcgctggcagatctggcagagttcgaccctgcggaactgctggccccttataccggtgatatcgccgctgaaggaatcagcaaagccatgcgcggaggcgcaaagttcctgcatcacggcattaagcgccagcaacgttatgtggcggaagccattactgaagagtggcgtatggcacccggtccgcttgaagtggcctggtttgcggaagagacggctgccgtcgagcgtgctgttgatgccctgaccaaacggctggaaaaactggaggctaaatgacgccaggtgaagtacggcgcctatatttcatcattcgcacttttttaagctacggacttgatgaactgatccccaaaatgcgtatcaccctgccgctacggctatggcgatactcattattctggatgccaaatcggcataaagacaaacttttaggtgagcgactacgactggccctgcaagaactggggccggtttggatcaagttcgggcaaatgttatcaacccgccgcgatctttttccaccgcatattgccgatcagctggcgttattgcaggacaaagttgctccgtttgatggcaagctggcgaagcagcagattgaagctgcaatgggcggcttgccggtagaagcgtggtttgacgattttgaaatcaagccgctggcttctgcttctatcgcccaggttcataccgcgcgattgaaatcgaatggtaaagaggtggtgattaaagtcatccgcccggatattttgccggttattaaagcggatctgaaacttatctaccgtctggctcgctgggtgccgcgtttgctgccggatggtcgccgtctgcgcccaaccgaagtggtgcgcgagtacgaaaagacattgattgatgaactgaatttgctgcgggaatctgccaacgccattcagcttcggcgcaattttgaagacagcccgatgctctacatcccggaagtttaccctgactattgtagtgaagggatgatggtgatggagcgcatttacggcattccggtgtctgatgttgcggcgctggagaaaaacggcactaacatgaaattgctggcggaacgcggcgtgcaggtgttcttcactcaggtctttcgcgacagctttttccatgccgatatgcaccctggcaacatcttcgtaagctatgaacacccggaaaacccgaaatatatcggcattgattgcgggattgttggctcgctaaacaaagaagataaacgctatctggcagaaaactttatcgccttctttaatcgcgactatcgcaaagtggcagagctacacgtcgattctggctgggtgccaccagataccaacgttgaagagttcgaatttgccattcgtacggtctgtgaacctatctttgagaaaccgctggccgaaatttcgtttggacatgtactgttaaatctgtttaatacggcgcgtcgcttcaatatggaagtgcagccgcaactggtgttactccagaaaaccctgctctacgtcgaaggggtaggacgccagctttatccgcaactcgatttatggaaaacggcgaagcctttcctggagtcgtggattaaagatcaggtcggtattcctgcgctggtgagagcatttaaagaaaaagcgccgttctgggtcgaaaaaatgccagaactgcctgaattggtttacgacagtttgcgccagggcaagtatttacagcacagtgttgataagattgcccgcgagcttcagtcaaatcatgtacgtcagggacaatcgcgttattttctcggaattggcgctacgttagtattaagtggcacattcttgttggtcagccgacctgaatgggggctgatgcccggctggttaatggcaggtggtctgatcgcctggtttgtcggttggcgcaaaacacgctgattttttcatcgctcaaggcgggccgtgtaacgtataatgcggctttgtttaatcatcatctaccacagaggaacatgtatgggtggtatcagtatttggcagttattgattattgccgtcatcgttgtactgctttttggcaccaaaaagctcggctccatcggttccgatcttggtgcgtcgatcaaaggctttaaaaaagcaatgagcgatgatgaaccaaagcaggataaaaccagtcaggatgctgattttactgcgaaaactatcgccgataagcaggcggatacgaatcaggaacaggctaaaacagaagacgcgaagcgccacgataaagagcaggtgtaatccgtgtttgatatcggttttagcgaactgctattggtgttcatcatcggcctcgtcgttctggggccgcaacgactgcctgtggcggtaaaaacggtagcgggctggattcgcgcgttgcgttcactggcgacaacggtgcagaacgaactgacccaggagttaaaactccaggagtttcaggacagtctgaaaaaggttgaaaaggcgagcctcactaacctgacgcccgaactgaaagcgtcgatggatgaactacgccaggccgcggagtcgatgaagcgttcctacgttgcaaacgatcctgaaaaggcgagcgatgaagcgcacaccatccataacccggtggtgaaagataatgaagctgcgcatgagggcgtaacgcctgccgctgcacaaacgcaggccagttcgccggaacagaagccagaaaccacgccagagccggtggtaaaacctgctgcggacgctgaaccgaaaaccgctgcaccttccccttcgtcgagtgataaaccgtaaacatgtctgtagaagatactcaaccgcttatcacgcatctgattgagctgcgtaagcgtctgctgaactgcattatcgcggtgatcgtgatattcctgtgtctggtctatttcgccaatgacatctatcacctggtatccgcgccattgatcaagcagttgccgcaaggttcaacgatgatcgccaccgacgtggcctcgccgttctttacgccgatcaagctgacctttatggtgtcgctgattctgtcagcgccggtgattctctatcaggtgtgggcatttatcgccccagcgctgtataagcatgaacgtcgcctggtggtgccgctgctggtttccagctctctgctgttttatatcggcatggcattcgcctactttgtggtctttccgctggcatttggcttccttgccaataccgcgccggaaggggtgcaggtatccaccgacatcgccagctatttaagcttcgttatggcgctgtttatggcgtttggtgtctcctttgaagtgccggtagcaattgtgctgctgtgctggatggggattacctcgccagaagacttacgcaaaaaacgcccgtatgtgctggttggtgcattcgttgtcgggatgttgctgacgccgccggatgtcttctcgcaaacgctgttggcgatcccgatgtactgtctgtttgaaatcggtgtcttcttctcacgcttttacgttggtaaagggcgaaatcgggaagaggaaaacgacgctgaagcagaaagcgaaaaaactgaagaataaattcaaccgcccgtcagggcggttgtcatatggagtacaggatgtttgatatcggcgttaatttgaccagttcgcaatttgcgaaagaccgtgatgatgttgtagcgtgcgcttttgacgcgggagttaatgggctactcatcaccggcactaacctgcgtgaaagccagcaggcgcaaaagctggcgcgtcagtattcgtcctgttggtcaacggcgggcgtacatcctcacgacagcagccagtggcaagctgcgactgaagaagcgattattgagctggccgcgcagccagaagtggtggcgattggtgaatgtggtctcgactttaaccgcaacttttcgacgccggaagagcaggaacgcgcttttgttgcccagctacgcattgccgcagatttaaacatgccggtatttatgcactgtcgcgatgcccacgagcggtttatgacattgctggagccgtggctggataaactgcctggtgcggttcttcattgctttaccggcacacgcgaagagatgcaggcgtgcgtggcgcatggaatttatatcggcattaccggttgggtttgcgatgaacgacgcggactggagctgcgggaacttttgccgttgattccggcggaaaaattactgatcgaaactgatgcgccgtatctgctccctcgcgatctcacgccaaagccatcatcccggcgcaacgagccagcccatctgccccatattttgcaacgtattgcgcactggcgtggagaagatgccgcatggctggctgccaccacggatgctaatgtcaaaacactgtttgggattgcgttttagagtttgcggaactcggtattcttcacactgtgcttaatctctttattaataagattaagcaatagcatggagcgagcctcaccatcgggttcggtgaaaatggcctgaaagccttcgaacgcgccttcggtaataatcaccttatcacccggataaggggttgccggatcgacaatgtctttcggtttatataccgatagctgatgaataaccgccgatgggactatcgctggcgacgcgccaaagcgcacgaagtggctgacaccgcgggtcgcgttgatagtcgtggtatgaatcacttctgggtcaaattccacaaacaggtagttggggaacaatggctcactgactgcagtacgttttccacgcacgattttttccagggtgatcatcggtgccaggcaattcacagcctgtctttcgaggtgttcctgggcacgttgaagttgcccgcgcttgcagtacagtaaataccaggattgcataatgactcttatccgtttaatcggggcgcaaggatagcaaaagctttacgctaagttaattatattccccggtttgcgttataccgtcagagttcacgctaatttaacaaatttacagcatcgcaaagatgaacgccgtataatgggcgcagattaagaggctacaatggacgccatgaaatataacgatttacgcgacttcttgacgctgcttgaacagcagggtgagctaaaacgtatcacgctcccggtggatccgcatctggaaatcactgaaattgctgaccgcactttgcgtgccggtgggcctgcgctgttgttcgaaaaccctaaaggctactcaatgccggtgctgtgcaacctgttcggtacgccaaagcgcgtggcgatgggcatggggcaggaagatgtttcggcgctgcgtgaagttggtaaattattggcgtttctgaaagagccggagccgccaaaaggtttccgcgacctgtttgataaactgccgcagtttaagcaagtattgaacatgccgacaaagcggctgcgtggtgcgccctgccaacaaaaaatcgtctctggcgatgacgtcgatctcaatcgcattcccattatgacctgctggccggaagatgccgcgccgctgattacctgggggctgacagtgacgcgcggcccacataaagagcggcagaatctgggcatttatcgccagcagctgattggtaaaaacaaactgattatgcgctggctgtcgcatcgcggcggcgcgctggattatcaggagtggtgtgcggcgcatccgggcgaacgtttcccggtttctgtggcgctgggtgccgatcccgccacgattctcggtgcagtcactcccgttccggatacgctttcagagtatgcgtttgccggattgctacgtggcaccaagaccgaagtggtgaagtgtatctccaatgatcttgaagtgcccgccagtgcggagattgtgctggaagggtatatcgaacaaggcgaaactgcgccggaagggccgtatggcgaccacaccggttactataatgaagtcgatagtttcccggtatttaccgtgacgcatattacccagcgtgaagatgcggtttaccattccacctataccgggcgtccgccagatgagcccgcggtgctgggtgtcgcactgaacgaagtgtttgtgccgattctgcaaaaacagttcccggaaattgtcgatttttacctgccgccggaaggctgctcttatcgcctggcggtagtgacaatcaaaaaacagtacgccggacacgcgaagcgcgtcatgatgggcgtctggtcgttcttacgccagtttatgtacactaaatttgtgatcgtttgcgatgatgacgttaacgcacgcgactggaacgatgtgatttgggcgattaccacccgtatggacccggcgcgggatactgttctggtagaaaatacgcctattgattatctggattttgcctcgcctgtctccgggctgggttcaaaaatggggctggatgccacgaataaatggccgggggaaacccagcgtgaatggggacgtcccatcaaaaaagatccagatgttgtcgcgcatattgacgccatctgggatgaactggctatttttaacaacggtaaaagcgcctgatgcgcgtttgttttgccctatttatcgatccgacagagaaagcgcatgacaaccttaagctgtaaagtgacctcggtagaagctatcacggataccgtatatcgtgtccgcatcgtgccagacgcggccttttcttttcgtgctggtcagtatttgatggtagtgatggatgaacgcgacaaacgtccgttctcaatggcttcgacgccggatgaaaaagggtttatcgagctgcatattggcgcttctgaaatcaacctttacgcgaaagcagtcatggaccgcatcctcaaagatcatcaaatcgtggtcgacattccccacggagaagcgtggctgcgcgatgatgaagagcgtccgatgattttgattgcgggcggcaccgggttctcttatgcccgctcgattttgctgacagcgttggcgcgtaacccaaaccgtgatatcaccatttactggggcgggcgtgaagagcagcatctgtatgatctctgcgagcttgaggcgctttcgttgaagcatcctggtctgcaagtggtgccggtggttgaacaaccggaagcgggctggcgtgggcgtactggcaccgtgttaacggcggtattgcaggatcacggtacgctggcagagcatgatatctatattgccggacgttttgagatggcgaaaattgcccgcgatctgttttgcagtgagcgtaatgcgcgggaagatcgcctgtttggcgatgcgtttgcatttatctgagatataaaaaaacccgcccctgacaggcgggaagaacggcaactaaactgttattcagtggcatttagatctatgacgtatctggcaaaccatgcccgatgcgacgctgtcgcgtcttatcgtgcctacaaatagtccgaaccgtaggccggataaggcgtttacgccgcatccggcaattggtgcatgatgcctgatgcgacgctggcgcgtcttatcaggcctacattggtgccggatcggtagaccggataaggcgttcacgccgcatccggcaagtggttaaacccgctcaaacaccgtcgcaataccctgacccagaccgatacacatcgtcgccagaccaaactgaacgtctttgcgttccatcagattcagcagcgtggtgctgatacgcgcaccggaacaacccagcggatgacccagcgcgatcgcgccaccgttgaggttgatcttctcgtcaatctgctcaattagtcccagatctttaatacatggcaggatctgcgcggcaaaggcttcgttcatttcaaacacgccgatatcgctggcagaaagccccgcttttttcagcgccagtttcgaggccggaaccgggccgtaacccataatcgatgggtcacaaccaacgaccgccatcgaacgcacacgagcgcgcggcttaagacctaattcatgggcgcggctttcactcatcaccagcatggcagctgcgccatcggaaagtgcagaagatgtgcccgccgttaccataccgtttactggatcaaacgccggacgcagcgtggcgagggcttccacggtggtttccgggcgaatcacttcgtcgtaattaaactgcttcaggacgccgtcggcatcgtgaccaccggtcgggatgatttcatttttaaatgcggccgactgcgtggcggcccaggcgcgggcgtgtgaccgcgcggcaaaggcatcctgcatttcacggctgataccgtgcatacgcgccagcatttctgccgttaagcccatcatgcccgccgctttggcgacattgcggctcaggccggggtgaaaatcgacgccgtgactcatcggcacatggcccatatgctccacgccgccaaccagacatgcctgcgcatcgccagtcatgatcattcgtgctgcgtcatgcagtgcctgcatggatgaaccacacaagcgattaacggtaaccgccgggacagagtgtggtacttctgccagcagcgccgcgttacgggcgatattaaaaccctgctccagcgtctgctgcacacaaccccagtaaatatcgtcgagggccgccgcttccagcgccgggttacgcgccagcaggctacgcattaaatgagcggagagatcttctgcacgcacgttacgaaaagcaccgcccttcgaacggcccatcggggtgcgaattgcatcgacaatgacaacctgttccattgtgactccttaagccgttttcaggtcgccaaccggacgggctggctcaaccggaggatagtacggttcgttatgacgcgctttattacgcagaccttccggcacttcatacagcgggccgaggtgctgatattgctgtgccatatcgaggtattttgcgctaccgagggtgtccagccagcggaacgcgccgccgtggaacggagggaagcccaggccgtagaccagcgccatatccgcttccgccggagtggcgataatgccttcctccagacagcgcaccacttcgttgaccatcgggatcatcatgcgggcgataatctcttcttcgctgaaatcgcgcttcggctggctcacttctgccagcaggtcttcaacggcggcgtcttcttctttcttcggcttacctttgctgtcttctttataacgccagaaaccgaggccgttcttctgaccaaagcggttggcatcaaacagcgcgtcgatggcatcgcggtaatctttctgcatccgctgcgggaagcctgctgccatgacagcctgagcgtgatgcgcggtatcaatgcccacaacgtccagcagatatgccgggcccatcggccagccaaactgtttttccatcactttgtcgatcttgcggaaatccgcgccgtcgcgcagcagctggctgaaaccggcgaaatacgggaacagcacgcggttaacaaagaagccggggcagtcgttaaccacaatcggcgtcttgcccatcttgctcgcccaggcgacaactttcgcgatggtttcgtcggagcttttctcgccgcgaataatttctaccaacggcattcggtggaccgggttaaagaagtgcatcccgcagaagttttccgggcgttccagcgcgttggccagttcgctgataggaatggttgaagtgttagacgccagcacggtatcctggcgtactttttgttcggtttctgccagtacggcttttttcactttcgggttttcaacaaccgcttctaccacaatatccacgcggtcaaatccggcgtagtcgagcgttgggtggattgtggagatcacgccagccagtttcagaccatcgatcttgccgcgctcaagctgcttgttcagcagtttcgcggcttcggtcatgccgagggttaacgacttgtcgttgatatctttcatgacaaccggcacgcctttccacgcagactggtaagcgatgccgccgcccataatgcctgcacccagcaccgcggcctgtttcggggtttcaacgtctttggtgagtttcttcgctttgccttttacatattgatcgttaaggaaaatgccgaccagtgcgcgggcttcgttggtatgcgccagcgggacaaaacttttgttttccaggtttaaggcttcttcacgaccaaaacgggccgcagcttcaatggtttttactgcggtgatgggggccggataatgtttccccgctgtttgtgcgaccatccctttagcgatggtgaagctcatggtggcttcaatcttgctcagttttagtggttccagcttcggctgacgttttgctttccagtcgaggtcgccgttaatggcctggcgtaaaaccgcctttgcgccttcaaccagtttttctgctttgactacgccatccaccagaccgattttcagcgcctgatccgcgccgacatctttaccggcggcaatgatttccagcgcactgtcagcgcccagcatacgtggcatacgtacagaaccgccaaagccaggcatgatgcccagtttggtttccggcagaccgatgcgcagatccggcgtcgccagacgataatcggtcgccagcacgcattcgcagccaccgcccagcgcatagccattgacggcagcaatggtcggcaccggcagatcttccaggcgattaaacacgctattggcaaagtgcagccactgacttaactgttcttcaggaacgaggaacagggacaaaaattcggtgatatcagcaccgacgataaaggctgctttgttcgaacgcagcagcagcccttttagatctgattgctgttccagcacgccgatggcctcgccgaggctggcgacggtcgcagtgtcgagtttattaactgaacctggggcatcaaataccagttcggcaatgccatcttccagccagtcaaggtacagggtgtcgcctttgtaaagcatgtcagtctcctgaatccgcaaggtgatctggtcgtaccagatgagtcgaagtgtgtattttgtgttaaaaatatgcaaacaaaagattaaagaaatgccgatctgatcacgctcggcagaaatcacgctctggatgaacgatgtgctaagatgcggagacttaaggtcaaaaaaacagaagggtaaaaaatggaatcactggcctcgctctataaaaatcatatagctaccttacaagaacggactcgcgatgcgctggcgcgcttcaagctggatgcgttacttattcactccggcgagctgttcaatgtttttctcgacgatcatccctatccgtttaaagtgaacccgcaattcaaagcgtgggtgccggtaactcaggtgccaaactgctggttgctggtggatggcgtgaacaagccgaaactgtggttctatctgccggttgattactggcacaacgtcgaaccgctgccgacctctttctggactgaagatgtggaagtgatcgcgctgccgaaagccgatggcattggtagcctgctgcctgctgcgcgcggcaatatcggttatatcggtccggtgccggaacgtgcgctgcaactgggtattgaggccagcaacatcaacccgaaaggggttatcgactacctgcattactatcgctccttcaaaactgagtacgaactggcctgtatgcgtgaagcgcagaaaatggcggtcaacggtcaccgcgcggcagaagaagcgttccgttctggcatgagcgagttcgatatcaacattgcctatctgaccgcgaccggtcatcgtgataccgacgtaccttacagcaacattgtggcgcttaacgaacacgctgcggtactgcattacaccaaactggaccatcaggcaccggaagagatgcgcagcttcctgctggatgccggggcagaatataacggctatgcggctgacctgacccgtacctggtcggcaaaaagtgacaacgactacgcgcagctggtgaaggacgttaatgatgaacaactggcgctgatcgccaccatgaaagcaggcgtcagctatgtggattaccacatccagttccatcagcgcatcgccaaactgctgcgtaaacatcaaatcatcaccgatatgagtgaagaagcgatggtcgaaaacgatcttaccgggccgtttatgccgcatggtatcggccatccgctgggcctgcaggtgcatgacgtcgctggttttatgcaggatgatagcggtacgcacctcgcggcaccggcaaaatatccgtacctgcgctgcacccgtattctccagccgggcatggtgttaaccatcgaaccgggtatctacttcatcgaatcgctactggcaccgtggcgtgaagggcagttcagcaagcacttcaactggcagaaaattgaagcactgaaaccgttcggcggcattcgtatcgaagacaacgtggtgatccacgaaaacaacgtggaaaacatgacccgggatctgaaactggcgtgatggaaagctggttaattcctgcggcaccggtcacggtcgttgaagagatcaaaaagagccgcttcataacgatgttggcgcataccgatggcgttgaggcggcgaaagcgtttgttgaatcggtgcgggcagaacaccccgatgcccggcaccattgcgtggcgtgggtcgcgggtgcgccggatgattctcaacagctgggtttctctgacgacggggagccggcgggaacggcaggtaaaccgatgctcgcccagctaatgggcagcggcgtcggggaaattaccgctgtggtagtgcgctactacggcggcatattgcttggcaccggtgggttagtgaaagcgtatggcggcggcgtgaatcaggcgctgcgccagctaacgacccaacgcaagacgccattaaccgaatatactttgcaatgtgaatatcatcagttaaccggcattgaagcgttgctggggcagtgtgacggcaaaattatcaacagtgattatcaggcattcgttctgctgcgggtggcgcttccggcggcgaaagtggctgaattttccgcaaagctggcggattttagccgtggttcattgcaattgttagcgattgaagaataatccccacttcgttttgcagaactaaggaagcggcagagatgcattttcgcgccattacccgaatcgttggactactggtcatcttattttcagggaccatgattatccctgggctggtagcactcatctaccgggatggagcgggccgcgcttttacccagaccttttttgtcgccctcgccattggctctatgctgtggtggccgaaccgcaaagagaaaggcgaacttaaatcccgtgaggggtttctgatagtggtgctgttctggaccgtgctgggtagcgtcggtgcgctcccttttatcttctcggaaagcccgaacctcacgattaccgatgcgttttttgaatctttctctggcctgaccactacgggagccactacgctggtggggctggattcgctccctcacgccatcctcttttatcgccagatgctgcaatggtttggcgggatggggatcatcgtgttggcggttgcgatactgcctatcctcggcgtgggtgggatgcagctctatcgcgcagaaatgcccggcccgctgaaagataacaaaatgcgcccgcgaattgcggaaacggcgaaaaccctgtggttgatttatgtcttgctgaccgtcgcctgtgcgctggcgttgtggtttgccggaatggatgcctttgatgccatcggccatagctttgcgactatcgctattggcggcttctcgacacatgatgccagtatcggttatttcgatagcccgactattaacactatcattgctatcttcctgctgatctccggctgtaactacggtctgcacttttcactgttaagtgggcgtagtctgaaggtttattggcgcgatccggaatttcgcatgtttatcggcgtacagtttacgctggtggttatttgtaccctcgtactgtggtttcataatgtctacagttcggcgctgatgacaattaaccaggcgtttttccaggtggtgtcgatggcgacaaccgccgggtttacaactgacagcattgcccgctggccgctctttttgccggtactgcttttatgttcagcctttatcggcggttgcgccgggtcaacgggcggtggcctgaaggtgatccgcatcctgctgctgtttaagcaggggaaccgtgagctgaaacgactggtgcatccgaacgccgtctatagcattaagctggggaatcgcgcactgccggaacgtatcctcgaagccgtttggggatttttctccgcctatgcattggtgtttattgtcagtatgctggcgattatcgccacgggcgtggatgacttttctgcctttgcgtcggttgttgcgacattgaataacctggggccagggcttggcgtggttgctgataactttaccagtatgaacccggtggctaaatggatcctgattgccaacatgctgtttggtcgtctcgaggtctttacattgctggtgctctttaccccgactttctggcgtgaatgatggagtaatacgtgaaaacattaattcttttctcaacaagggacggacaaacgcgcgagattgcctcctacctggcttcggaactgaaagaactggggatccaggcggatgtcgccaatgtgcaccgcattgaagaaccacagtgggaaaactatgaccgtgtggtcattggtgcttctattcgctatggtcactaccattcagcgttccaggaatttgtcaaaaaacatgcgacgcggctgaattcgatgccgagcgccttttactccgtgaatctggtggcgcgcaaaccggagaagcgtactccacagaccaacagctacgcgcgcaagtttctgatgaactcgcaatggcgtcccgatcgctgcgcggtcattgccggggcgctgcgttacccacgttatcgctggtacgaccgttttatgatcaagctgattatgaagatgtcaggcggtgaaacggatacgcgcaaagaagttgtctataccgattgggagcaggtggcgaatttcgcccgagaaatcgcccatttaaccgacaaaccgacgctgaaataagcataaagaataaaaaatgcgcggtcagaaaattattttaaatttcctcttgtcaggccggaataactccctataatgcgccaccactgacacggaacaacggcaaacacgccgccgggtcagcggggttctcctgagaactccggcagagaaagcaaaaataaatgcttgactctgtagcgggaaagcgtattatgcacaccccgcgccgctgagaaaaagcgaagcggcactgctctttaacaatttatcagacaatctgtgtgggcactcgaagatacggattcttaacgtcgcaagacgaaaaatgaataccaagtctcaagagtgaacacgtaattcattacgaagtttaattctttgagcatcaaacttttaaattgaagagtttgatcatggctcagattgaacgctggcggcaggcctaacacatgcaagtcgaacggtaacaggaagaagcttgcttctttgctgacgagtggcggacgggtgagtaatgtctgggaaactgcctgatggagggggataactactggaaacggtagctaataccgcataacgtcgcaagaccaaagagggggaccttcgggcctcttgccatcggatgtgcccagatgggattagctagtaggtggggtaacggctcacctaggcgacgatccctagctggtctgagaggatgaccagccacactggaactgagacacggtccagactcctacgggaggcagcagtggggaatattgcacaatgggcgcaagcctgatgcagccatgccgcgtgtatgaagaaggccttcgggttgtaaagtactttcagcggggaggaagggagtaaagttaatacctttgctcattgacgttacccgcagaagaagcaccggctaactccgtgccagcagccgcggtaatacggagggtgcaagcgttaatcggaattactgggcgtaaagcgcacgcaggcggtttgttaagtcagatgtgaaatccccgggctcaacctgggaactgcatctgatactggcaagcttgagtctcgtagaggggggtagaattccaggtgtagcggtgaaatgcgtagagatctggaggaataccggtggcgaaggcggccccctggacgaagactgacgctcaggtgcgaaagcgtggggagcaaacaggattagataccctggtagtccacgccgtaaacgatgtcgacttggaggttgtgcccttgaggcgtggcttccggagctaacgcgttaagtcgaccgcctggggagtacggccgcaaggttaaaactcaaatgaattgacgggggcccgcacaagcggtggagcatgtggtttaattcgatgcaacgcgaagaaccttacctggtcttgacatccacggaagttttcagagatgagaatgtgccttcgggaaccgtgagacaggtgctgcatggctgtcgtcagctcgtgttgtgaaatgttgggttaagtcccgcaacgagcgcaacccttatcctttgttgccagcggtccggccgggaactcaaaggagactgccagtgataaactggaggaaggtggggatgacgtcaagtcatcatggcccttacgaccagggctacacacgtgctacaatggcgcatacaaagagaagcgacctcgcgagagcaagcggacctcataaagtgcgtcgtagtccggattggagtctgcaactcgactccatgaagtcggaatcgctagtaatcgtggatcagaatgccacggtgaatacgttcccgggccttgtacacaccgcccgtcacaccatgggagtgggttgcaaaagaagtaggtagcttaaccttcgggagggcgcttaccactttgtgattcatgactggggtgaagtcgtaacaaggtaaccgtaggggaacctgcggttggatcacctccttaccttaaagaagcgttctttgaagtgctcacacagattgtctgatgaaaatgagcagtaaaacctctacaggcttgtagctcaggtggttagagcgcacccctgataagggtgaggtcggtggttcaagtccactcaggcctaccaaatttgcacggcaaatttgaagaggttttaactacatgttatggggctatagctcagctgggagagcgcctgctttgcacgcaggaggtctgcggttcgatcccgcatagctccaccatctctgtagtgattaaataaaaaatacttcagagtgtacctgcaaaggttcactgcgaagttttgctctttaaaaatctggatcaagctgaaaattgaaacactgaacaacgaaagttgttcgtgagtctctcaaattttcgcaacacgatgatgaatcgaaagaaacatcttcgggttgtgaggttaagcgactaagcgtacacggtggatgccctggcagtcagaggcgatgaaggacgtgctaatctgcgataagcgtcggtaaggtgatatgaaccgttataaccggcgatttccgaatggggaaacccagtgtgtttcgacacactatcattaactgaatccataggttaatgaggcgaaccgggggaactgaaacatctaagtaccccgaggaaaagaaatcaaccgagattcccccagtagcggcgagcgaacggggagcagcccagagcctgaatcagtgtgtgtgttagtggaagcgtctggaaaggcgtgcgatacagggtgacagccccgtacacaaaaatgcacatgctgtgagctcgatgagtagggcgggacacgtggtatcctgtctgaatatggggggaccatcctccaaggctaaatactcctgactgaccgatagtgaaccagtaccgtgagggaaaggcgaaaagaaccccggcgaggggagtgaaaaagaacctgaaaccgtgtacgtacaagcagtgggagcacgcttaggcgtgtgactgcgtaccttttgtataatgggtcagcgacttatattctgtagcaaggttaaccgaataggggagccgaagggaaaccgagtcttaactgggcgttaagttgcagggtatagacccgaaacccggtgatctagccatgggcaggttgaaggttgggtaacactaactggaggaccgaaccgactaatgttgaaaaattagcggatgacttgtggctgggggtgaaaggccaatcaaaccgggagatagctggttctccccgaaagctatttaggtagcgcctcgtgaattcatctccgggggtagagcactgtttcggcaagggggtcatcccgacttaccaacccgatgcaaactgcgaataccggagaatgttatcacgggagacacacggcgggtgctaacgtccgtcgtgaagagggaaacaacccagaccgccagctaaggtcccaaagtcatggttaagtgggaaacgatgtgggaaggcccagacagccaggatgttggcttagaagcagccatcatttaaagaaagcgtaatagctcactggtcgagtcggcctgcgcggaagatgtaacggggctaaaccatgcaccgaagctgcggcagcgacactatgtgttgttgggtaggggagcgttctgtaagcctgtgaaggtgtgctgtgaggcatgctggaggtatcagaagtgcgaatgctgacataagtaacgataaagcgggtgaaaagcccgctcgccggaagaccaagggttcctgtccaacgttaatcggggcagggtgagtcgacccctaaggcgaggccgaaaggcgtagtcgatgggaaacaggttaatattcctgtacttggtgttactgcgaaggggggacggagaaggctatgttggccgggcgacggttgtcccggtttaagcgtgtaggctggttttccaggcaaatccggaaaatcaaggctgaggcgtgatgacgaggcactacggtgctgaagcaacaaatgccctgcttccaggaaaagcctctaagcatcaggtaacatcaaatcgtaccccaaaccgacacaggtggtcaggtagagaataccaaggcgcttgagagaactcgggtgaaggaactaggcaaaatggtgccgtaacttcgggagaaggcacgctgatatgtaggtgaagcgacttgctcgtggagctgaaatcagtcgaagataccagctggctgcaactgtttattaaaaacacagcactgtgcaaacacgaaagtggacgtatacggtgtgacgcctgcccggtgccggaaggttaattgatggggttagccgcaaggcgaagctcttgatcgaagccccggtaaacggcggccgtaactataacggtcctaaggtagcgaaattccttgtcgggtaagttccgacctgcacgaatggcgtaatgatggccaggctgtctccacccgagactcagtgaaattgaactcgctgtgaagatgcagtgtacccgcggcaagacggaaagaccccgtgaacctttactatagcttgacactgaacattgagccttgatgtgtaggataggtgggaggctttgaagtgtggacgccagtctgcatggagccgaccttgaaataccaccctttaatgtttgatgttctaacgttgacccgtaatccgggttgcggacagtgtctggtgggtagtttgactggggcggtctcctcctaaagagtaacggaggagcacgaaggttggctaatcctggtcggacatcaggaggttagtgcaatggcataagccagcttgactgcgagcgtgacggcgcgagcaggtgcgaaagcaggtcatagtgatccggtggttctgaatggaagggccatcgctcaacggataaaaggtactccggggataacaggctgataccgcccaagagttcatatcgacggcggtgtttggcacctcgatgtcggctcatcacatcctggggctgaagtaggtcccaagggtatggctgttcgccatttaaagtggtacgcgagctgggtttagaacgtcgtgagacagttcggtccctatctgccgtgggcgctggagaactgaggggggctgctcctagtacgagaggaccggagtggacgcatcactggtgttcgggttgtcatgccaatggcactgcccggtagctaaatgcggaagagataagtgctgaaagcatctaagcacgaaacttgccccgagatgagttctccctgactccttgagagtcctgaaggaacgttgaagacgacgacgttgataggccgggtgtgtaagcgcagcgatgcgttgagctaaccggtactaatgaaccgtgaggcttaaccttacaacgccgaaggtgttttggcggattgagagaagattttcagcctgatacagattaaatcagaacgcagaagcggtctgataaaacagaatttgcctggcggcagtagcgcggtggtcccacctgaccccatgccgaactcagaagtgaaacgccgtagcgccgatggtagtgtggggtctcctcatgcgagagtagggaactgccaggcatcaaataaaacgaaaggctcagtcggaagactgggcctttcgttttatctgttgtttgtcggtgaacgctctcctgagtaggacaaatccgccgggagcggatttgaacgttgcgaagcaacggcccggagggtggcgggcaggacgcccgccataaactgccaggcatcaaattaagcagaaggccatcctgacggatggcctttttgcattggcgcagaaaaaaatgccggatgcgacgctggcgcgtcttatccagcctactcttgcttatccgttctgcttttgcatccactccaccacaaaatcagccagcccctcaacatcattaatatccagtaatgcgacatcaagattaagcggcacatcactggctacagcaataacatgcctgtctatcactaattcttcaggtcgatgtccggctccatcgcgaaacagcacaatctttgcgatctcttcatgcttaaacccttcgaccagaatcaaatccagctttgaggtatccattcgacttgcgagaaactgtagatccagctcttcttcgtctggtgtttccgtcatcaaggcccatcgttgctggctggcaacgatggtttgtgccgcgccagccttgcgcagctcatagctatctttgcctggcttatcaacatccatatcatggtgcgtatgcttaatcagccctggacggatccctctggcgcataatgccgggatcagttttttcaaaagcgtagtttttccggtaccactccacgcggcaaaggcgagtaacggtatcatcgtttttcctgccatcgggcaagctcctctggcgtattcacgttaacaaatgcatctttatgatcgctgaaatcaaccgcatgaccgccagccagacgcataaataccattacccggcgttctcctgcttgcagatattccagtaataaaggctcaatagcgcggtttaccagagcaatagtcgggtgatcgcgttcaccgtcatggacccacacgacaggcgcatctttgcgctgatgattaagcctggctgctaaatcagggggaatgtaaggcgtatcgcacgggcaaaacaaaaaccactcaccagcttcctgctgcattactgaaagcattcctgccagagggcctgggtaatccgccagtgaatcttcaatcactttcagaccgcttgcctgatagatttcctgatgacgattagcattaaccacgacgtgagagagctgcgtcataagcgcgtcagcgacatgttgccataatggtttgccgtttaattcaagcaatcctttatctacgccgcccattcgtctggctttaccgcctgccagcacaacgcctgttatcgtcgtcatcagattcaccgatatcgcctcttttattgtgggattgaccctgctaacgtgtctgtctcaagagtaaggagcatcactatgaaatgtaaacgtctgaatgaagttattgaactcctccagccagcctggcaaaaagagccagaccttaacctgctgcaatttttgcagaaactggcgaaagagtcaggttttgacggcgaactggcggatttgacggatgacattctgatctatcacctgaaaatgcgtgattccgcgaaagatgcggtgatcccgggtttgcagaaagattatgaagaagacttcaaaacggcgctgttacgcgctcgcggcgtaattaaagagtaaaagcttgtaagcggcgccaccaaaatcatcgtgaaatgatatccttcgtcattcgtaatgttttccggatgatgggatgaataacagcgcttttactttccagacactacacccggataccatcatggacgctctgtttgagcatgggatccgggtggattccggtcttaccccgcttaacagctatgaaaaccgtgtctatcaatttcaggacgaagatcgtcgacgttttgtcgtcaaattttatcgccctgaacgttggacagccgatcaaatcctcgaagaacatcaatttgcgttgcagctggtaaatgatgaagttccggtcgcagcacctgtggcctttaacggtcagactttattgaatcatcagggattttatttcgctgtttttccaagcgtcggtggtcgccagttcgaagctgataatatcgatcagatggaagcggttgggcgttatttagggcgtatgcaccagacggggcacaaacagctttttatccatcgcccgaccatcggtttgaacgaatatctcattgagccacgcaagctgtttgaggacgctacactgataccttccgggttgaaagcggcattcctgaaagcgacagatgagctgattgccgccgttacagcacactggcgggaagatttcaccgttctgcggctacatggagactgccacgccgggaatattctctggcgcgatggtccaatgtttgttgatctggatgatgcacgtaatggtccagccgttcaggatttgtggatgttgctcaatggcgataaagccgagcagcggatgcaactggaaactattattgaagcttatgaagaatttagcgagttcgacaccgctgaaatcggactgattgaacctttacgcgccatgcgtttggtttattatcttgcctggctaatgcggcgttgggctgatcccgcgttcccgaaaaatttcccgtggttaaccggggaagattactggctgcgacagacggcgacttttatagaacaggcaaaagttctacaagaaccccctttgcaattaacacctatgtattaatcggagagagtagatcatgaaaaagatttggctggcgctggctggtttagttttagcgtttagcgcatcggcggcgcagtatgaagatggtaaacagtacactaccctggaaaaaccggtagctggcgcgccgcaagtgctggagtttttctctttcttctgcccgcactgctatcagtttgaagaagttctgcatatttctgataatgtgaagaaaaaactgccggaaggcgtgaagatgactaaataccacgtcaacttcatgggtggtgacctgggcaaagatctgactcaggcatgggctgtggcgatggcgctgggcgtggaagacaaagtgactgttccgctgtttgaaggcgtacagaaaacccagaccattcgttctgcttctgatatccgcgatgtatttatcaacgcaggtattaaaggtgaagagtacgacgcggcgtggaacagcttcgtggtgaaatctctggtcgctcagcaggaaaaagctgcagctgacgtgcaattgcgtggcgttccggcgatgtttgttaacggtaaatatcagctgaatccgcagggtatggataccagcaatatggatgtttttgttcagcagtatgctgatacagtgaaatatctgtccgagaaaaaataattcaatgtaaattacataaagcccgtgaatattcacgggctttttttattatttaataaatataaatacattctgataatgcatcctgccgctggacattatttcagcataagtggatattcaaagttttgctgttttatcagggaatatttatatgatacgtaagtcagctacaggtgttattgttgcgttagccgtaatctggggtggtggcacatggtacacaggtacgcaaattcagcctggtatcgaaaaatttattaaagattttaacgatgctaaaaagaaaggtgaacatgcctacgatatgacgttaagttatcaaaattttgacaaaggcttttttaattcccgttttcaaatgcaaatgacattcgataacggtgcacccgatctcaatatcaagccaggccagaaagttgtatttgatgtggatgttgagcacggtccgttgcccatcacaatgttaatgcatggtaatgtcatcccagcactggcagcggcaaaagtgaacttagtgaataatgaactgacacaaccgctatttatcgccgcgaaaaataaatcgcccgtggaagcgacattgcgattcgcgtttggtggctcattctctacgacattagatgttgcccctgcagagtatggaaagttttcttttggtgagggccagtttacttttaatggtgatggtagttcattgtctaacctggatattgaaggcaaagtcgaagatattgttctgcaattatcaccaatgaacaaagtaacggcaaaaagttttaccattgattctctggcgcgattagaagaaaagaaatttccggttggtgaaagcgagtcgaaatttaatcagattaacattatcaatcacggggaagacgttgcccaaatcgatgctttcgttgcaaaaaccaggctggatcgcgttaaagacaaagattatatcaatgtcaatctcacctacgaacttgataagttaacaaaagggaatcagcaactcggtagtggtgagtggtcattgattgctgaatctattgatccctcagcagtgcgccaatttatcatccagtataacattgcgatgcagaagcagcttgctgcacaccctgagttagcaaacgatgaagttgctctgcaagaagtgaatgctgcattgttcaaagagtatttaccgttattacaaaaaagtgagccgaccattaaacaaccggtaagatggaagaacgcactcggcgaactaaatgccaatctggatatcagtattgccgacccagccaaatcttcatcatccacaaacaaagatatcaaatcgctcaattttgatgtgaagttaccgcttaatgtcgtcacagaaaccgcaaaacagcttaatttatctgaaggaatggatgcggaaaaagcgcaaaagcaggctgataaacaaatcagcgggatgatgacattaggtcagatgtttcagttaatcacgattgacaacaataccgcctcgctgcagctgcgttatacaccgggtaaagttgtttttaacggacaggagatgagcgaagaagaatttatgtctcgtgccggacgttttgttcattaaaatactcactcgcctctgctcattcagaggcgagtaaaacttacttattctgacgctgtgatgacatgagagacgtcagaagccggtctttttcctgccacaatgagttcagccattgctgaaaatggcgcttaaagcttttgtcattgatgtagtcgccatgtaactcatcggcaatagactgtaaatccacatgtacgacaatccgcgtcagtttaccgcttaacatatcgaagaacggctgacggttattgtccggataacacagcgtaacattaagcagtttatcgaattgtttacccagtacatttagcgccatcgcaatgcctgccgcctttggtggcaacaagttttgaaaagtggagtgggtttgctgatgtttttcttgcgtgaaacgggagccttcaacgaaattgacaatggtggtgggatgcaggcgaaacttttcacaagaacgccgagtggtttcaacatctttaccacgtcgctccggatgacgtaataaataagcgcgggaataacgcttcataaacggcatatccagcgaccagcacgccaggccaagaaatggcacccaggccagctgttgcttgaggaaatatttattcatcggaatgtgcttacgaaacagcacgcacagtacgacaatatctgcccaactacggtggttacaaataagcagataccagttcttcttacttaacccttccagcccgtgaacttcccattgaaggtgtgggttcagatgcagtaataccgccagaccttcacaccagcaatacatcataaaatcacaaaaacgcgaaacctttcgccaaatgactggcacaggtagcaatagttttacaatcccggcaatgatgatcgggacggaacaaaaaatagtgaccaaaatggtcaatacgatactcagcaaaagggttatcgcagcgagtattctcgtcataatgaatttattcaaaaggttagccatagacagtgcgctaaagaagcgcaaggcgcagattttagcagaaaacgacccaaataacggatgatccttaaggagaaaaataattcatatctatccacattagaaaaaatcccattatctcaattattagggatggatttatttttaactgcatgaaaaacaaagacaaacatcatgctgtaaaaagcatgataataaattaaaagcgatgtaaataatttatgcacaaagttatccacatgacgatttgcgagcgatccagaagatctacaaaagattttcacgaaaagcggtgaaaaactcatgttttcatcctgtctgtggcatcctttacccataatctgataaacaggcacggacattatggttcagatcccccaaaatccacttatccttgtagatggttcatcttatctttatcgcgcatatcacgcgtttcccccgctgactaacagcgcaggcgagccgaccggtgcgatgtatggtgtcctcaacatgctgcgcagtctgatcatgcaatataaaccgacgcatgcagcggtggtctttgacgccaagggaaaaacctttcgtgatgaactgtttgaacattacaaatcacatcgcccgccaatgccggacgatctgcgtgcacaaatcgaacccttgcacgcgatggttaaagcgatgggactgccgctgctggcggtttctggcgtagaagcggacgacgttatcggtactctggcgcgcgaagccgaaaaagccgggcgtccggtgctgatcagcactggcgataaagatatggcgcagctggtgacgccaaatattacgcttatcaataccatgacgaataccatcctcggaccggaagaggtggtgaataagtacggcgtgccgccagaactgatcatcgatttcctggcgctgatgggtgactcctctgataacattcctggcgtaccgggcgtcggtgaaaaaaccgcgcaggcattgctgcaaggtcttggcggactggatacgctgtatgccgagccagaaaaaattgctgggttgagcttccgtggcgcgaaaacaatggcagcgaagctcgagcaaaacaaagaagttgcttatctctcataccagctggcgacgattaaaaccgacgttgaactggagctgacctgtgaacaactggaagtgcagcaaccggcagcggaagagttgttggggctgttcaaaaagtatgagttcaaacgctggactgctgatgtcgaagcgggcaaatggttacaggccaaaggggcaaaaccagccgcgaagccacaggaaaccagtgttgcagacgaagcaccagaagtgacggcaacggtgatttcttatgacaactacgtcaccatccttgatgaagaaacactgaaagcgtggattgcgaagctggaaaaagcgccggtatttgcatttgataccgaaaccgacagccttgataacatctctgctaacctggtcgggctttcttttgctatcgagccaggcgtagcggcatatattccggttgctcatgattatcttgatgcgcccgatcaaatctctcgcgagcgtgcactcgagttgctaaaaccgctgctggaagatgaaaaggcgctgaaggtcgggcaaaacctgaaatacgatcgcggtattctggcgaactacggcattgaactgcgtgggattgcgtttgataccatgctggagtcctacattctcaatagcgttgccgggcgtcacgatatggacagcctcgcggaacgttggttgaagcacaaaaccatcacttttgaagagattgctggtaaaggcaaaaatcaactgacctttaaccagattgccctcgaagaagccggacgttatgccgccgaagatgcagatgtcaccttgcagttgcatctgaaaatgtggccggatctgcaaaaacacaaagggccgttgaacgtcttcgagaatatcgaaatgccgctggtgccggtgctttcacgcattgaacgtaacggtgtgaagatcgatccgaaagtgctgcacaatcattctgaagagctcacccttcgtctggctgagctggaaaagaaagcgcatgaaattgcaggtgaggaatttaacctttcttccaccaagcagttacaaaccattctctttgaaaaacagggcattaaaccgctgaagaaaacgccgggtggcgcgccgtcaacgtcggaagaggtactggaagaactggcgctggactatccgttgccaaaagtgattctggagtatcgtggtctggcgaagctgaaatcgacctacaccgacaagctgccgctgatgatcaacccgaaaaccgggcgtgtgcatacctcttatcaccaggcagtaactgcaacgggacgtttatcgtcaaccgatcctaacctgcaaaacattccggtgcgtaacgaagaaggtcgtcgtatccgccaggcgtttattgcgccagaggattatgtgattgtctcagcggactactcgcagattgaactgcgcattatggcgcatctttcgcgtgacaaaggcttgctgaccgcattcgcggaaggaaaagatatccaccgggcaacggcggcagaagtgtttggtttgccactggaaaccgtcaccagcgagcaacgccgtagcgcgaaagcgatcaactttggtctgatttatggcatgagtgctttcggtctggcgcggcaattgaacattccacgtaaagaagcgcagaagtacatggacctttacttcgaacgctaccctggcgtgctggagtatatggaacgcacccgtgctcaggcgaaagagcagggctacgttgaaacgctggacggacgccgtctgtatctgccggatatcaaatccagcaatggtgctcgtcgtgcagcggctgaacgtgcagccattaacgcgccaatgcagggaaccgccgccgacattatcaaacgggcgatgattgccgttgatgcgtggttacaggctgagcaaccgcgtgtacgtatgatcatgcaggtacacgatgaactggtatttgaagttcataaagatgatgttgatgccgtcgcgaagcagattcatcaactgatggaaaactgtacccgtctggatgtgccgttgctggtggaagtggggagtggcgaaaactgggatcaggcgcactaagattcgcctgaacatgccttttttcgtaagtaagcaacataagctgtcacgttttgtgatggctattagaaattcctatgcaacaactgaaaaaaaattacaaaaagtgctttctgaactgaacaaaaaagagtaaagttagtcgcgtagggtacagaggtaagatgttctatctttcagaccttttacttcacgtaatcggatttggctgaatattttagccgccccagtcagtaatgactggggcgttttttattgggcgaaagaaaagatccgtaatgcctgatgcgctatgtttatcaggccaacggtagaattgtaatctattgaatttacgggccggatacgccacatccggcacaagcattaaggcaagaaaattattcgccgtcctgcgtttcttctacaggctgcatctcgctaaaccaggtatccagtttctgccgcagcttgtccacgccttgtttcttcaacgaagaaaacgtttcaacctgcacatcaccgttaaacgccagtacagcttcacgcaccatattcaattgcgctttacgtgcgccgcttgccagtttgtccgctttggtcagcagcaccagaacggcgatattgctgtctaccgcccactcaatcatctgctgatccaaatctttcagcggatggcgaatatccattagcaccaccagaccttgcaggctctgacgtttttcgaggtattcgccgagcgcacgctgccatttgcgcttcatctcttccgggacttccgcataaccgtacccaggcaagtcaaccagacgcttgccgtcagccacttcaaacaggttgataagctgggtgcgccctggggtttttgaggtacgagccaggcttttctggttagtcagcgtgttcagcgcgctggatttacctgcgttggaacggcctgcaaaagccacttcaattccggtatcggaaggtaggtggcgaatatcaggcgcactcatcacaaaatgcgtctgttgataattcaaattagtcaaagcggtcgtctccgtcagtcaaagctttgtggcgattatacctgaaccataataaaaggcggatttttcggcgtgagcgttgtaagtaaaagccatacgctttgtgagacattgccgatagtctttatgcgaaatagcagagaaaattctgcgatgcatgtcaaataagctatataaatcagtgaattgcttttatataaaactctgaaaatgtgcaaatactgatggcggttgattgtttgtttaaagcaaaggcgtaaagtagcacccatagagcgaggacgctaacaggaacaatgactcaggatgagggtcaggagcgccaggaggcgaagacagaggattgtcaggaagacaaacgtccggagacgtaattaaacggaaatggaatcaacacggattgttccggctaaaggaaaaacagggtgtgttggcggcctgcaaggattgtaagacccgttaagggttatgagtcaggaaaaaaggcgacagagtaatctgtcgccttttttctttgcttgctttctgttagattccgccgcaaatctatactgaataaaacggctaaaagacgaaccattatgaaaccatcatcttcaaactcacgcagcaaaggtcatgcaaaagcgcgtcgaaaaacacgcgaggagctggatcaggaagctcgtgatcgcaagcgtcagaaaaaacgtcgtggtcatgcgccgggcagccgcgcagcgggcggaaacaccacgtcaggcagcaaaggccagaacgcaccaaaagatccacgtattggcagtaaaacccctattccattgggcgtgactgaaaaagtcaccaaacagcacaaaccgaagagtgagaaacctatgctttcaccgcaggcggagttggaattactggaaacggatgagcgtctggatgcgctgctggaacgtctggaagcaggcgaaaccctgagtgccgaagagcaatcctgggtggatgctaaactggatcgtattgatgagttgatgcagaaactcggcctctcttatgacgatgacgaagaagaggaagaagacgagaagcaagaagacatgatgcgtctgctgcggggcaactaacggattgccgccgtgggccttcccgttctgctgataacccttccggttatatgttatctggtgtggttattcgttaaactacagcggttgtcgcggcgacaaaagtggctgcgcaaccggctgatgacccgaaacgggcatccgccggtacgccgtagccgccagagacgccatcggaaggagtgagcatgtctgtacagcaaatcgactgggatctggccctgatccagaaatataactattccgggccacgatacacctcgtacccgaccgcgctggagttttcagaagacttcggcgaacaggcgtttttacaagccgtggcgcgctatcctgagcgtccattatctctctacgtacatatcccgttctgccataagctttgttacttctgcggttgcaataagattgttactcgccagcagcacaaggccgatcagtatctggacgcgctggagcaagaaatcgtccatcgtgcaccgctgttcgccgggcgtcacgtcagccaattgcactggggcggcggaacgccgacgtatctgaataaagcgcaaatcagccgcctgatgaagctgctgcgcgaaaacttccagttcaatgccgatgcggagatttcgatcgaagtcgatccgcgggaaatcgaactggatgtactcgatcatttacgcgccgaaggctttaatcgcctgagcatgggcgtgcaggacttcaacaaagaagtgcaacgtctggttaaccgcgagcaggatgaagagttcatctttgcactgcttaaccatgcgcgtgagattggttttacctccaccaacatcgacctgatttacggcctgccgaaacagacgccggagagtttcgcctttaccctgaaacgtgtggcggagctgaaccccgatcgtctgagtgtctttaactacgcgcatctgccgaccatttttgctgctcagcgcaaaatcaaagatgctgacctgccgagtccgcagcaaaaactcgatatcctgcaggaaaccatcgccttcctgacgcaatcgggctatcagtttatcggtatggatcactttgcccgtccggatgacgagctggcggtggcccagcgtgaaggcgtgctgcatcgtaacttccagggctacaccactcagggcgataccgatctgctggggatgggcgtttccgccatcagcatgattggcgactgctacgcgcagaaccagaaagagttgaagcagtactatcagcaagtggatgaacaaggcaatgcgctgtggcgtggtattgcgctaacgcgtgatgactgtattcgccgcgatgtgattaagtcgctcatctgcaacttccgtctggattacgcccctattgagaaacagtgggatttgcacttcgctgattactttgcggaagatctcaagctgctcgccccgttagcaaaagatgggctggtggatgtggatgagaagggaatacaggtgacggcgaaaggtcgcttgctgatccgcaacatttgcatgtgctttgatacctatctgcgccagaaagcgcggatgcagcagttctctcgggtgatttaaatagtgaatggcgcttcgtttacaaagtagaaaacgaaagcgccatcaatgtgctgagaacaagattgcctgatgcgctgggcaacaaaacctgttgaaattattgcttttgtaggccggataaggcgtttacgccgcatcaggcatctgagcatgatgcctgatgcggcgctggtcgcgtcttatcaggcctacgactttctccgcatccggcataaacaacgagcttcagctaaacagcccaatcattgcggcacacagcacggcagcaacggcagtttgcggtgtgtggctgtcaactgcgccactcgataccagattaattattgattccagcataatgactctccccgttttccgggcaagatcatactgaacttatcggaacagtaaagcgtaaaataccagcaatttgcgctcaataatcaatctttacacacaagctgtgaatcactccatccccagctcttttaacttacgcgtcagggtgttgcggccccagccgagtagccgcgccgcttcctgtttatgcccctgcgtatgtcgcaacgcggtcgtcagtaacgtccgctccagctctggctgcgcttcggaaagcagattttgatgaccggaacgcagcgctctgtctgcccactgcgcaagaagcgtcgcccagctgtccggttgcatttgcgaagtactctccgcaaccgttgattcaaacagttcgccgggcaaatcctgaatcaacacttcctgcccggcggccatcaccgttagccagcggcaggtgttttccagctggcgcacgttgcctggccacgccagacgcgtcagagcagcttcggtttccggatgcagtaacttcgcttctacgcccagttcgcgcgcggcaacctgtaaaaaatggcgcgccagacggggaatatcttcccgacgttcgcgcagcggcggcagatgaacgcggataacgttcaggcggtggaacagatcctcacggaacttaccttcctgcactcgctgttcgagattctggtgagtggcagcgataatccgcacatccactttcaccggcgcatagccgccaacgcggtaaaactgaccgtctgccagcacgcgcagcaaacgcgtctgcacatccagcggcatatcaccaatttcgtcgaggaataatgtaccgccatcggcctgttcaaaacgcccctgacgaatggtattcgcgccagtaaacgcgcctttctcgtggccaaacagttctgattcgatcaaatcttttgggatagctgccatattcagcgcgataaacggcgctttggcgcgcggactgtggcgatgcagggcatgagcgaccagttctttaccggtgccggattcgccgttaatcagcacgctaatagaagaacgcgaaagccgaccgataatacggaacacgtcctgcatggctggcgcttcgccgatgatatcggtcgttgggccgttaagctgaacattacgcggctgctgctgttcctggtaatgactgatagcgcgctcaaccagcgccactgcttcgtcgatatcaaacggtttgggcagataatcaaacgccccttgttgataggcgctgacggcagcatccagatcggaatgtgcggtcataatgatgaccggaagcattggatggcgctgtttaatctgcttgagcagcgccagcccgtccattcccggcatacggatatctgaaagcagcacatccggcgttttgctcgccagcgcctccagcacttctgcgccgttctcaaacgtcgtacaggttaaacctgccccagcgagcgcacgttcaagcacccaacggatggaactatcgtcatcgactacccagactatccctcgttgcataaacgtcacctttatttcctgataggcaggtaaaccgagaactcggtatgccctggccaactggtaaattcaattttgcctgaatgctgatcaatcaaattacgagcgatggataagccaagcccggtgccaccttcgcggccgctgaccatcgggtaaaacagcgtatcctgcaaatgaggcggaatgcccggcccgttatcttccacatcaatccgcgccgccagccggtagcgctcgccgtgtaaggtcagttgaaacgcggtgcgggtacgcagaatgatttcaccgccttccggccccagcgcctgtagcgcattgcgcacaatattcagcaagacctgttcaatttgatccgggtcgtgcgccagttccggtaggctgggatcgtaatcacgaatcaaccgcacgttgtccggcagttccatcgacaccagcgttaccacgcgttcagccactttgtgaatactttcggtaacgcgcgtaccgggcagctgcggccccaacagacggtcgaccagatttcgcagccggtccgcctgttcgataatcactttggtatattcgagtagtgatgggtcaggtaacgctttgctgagcagctgcgccgcgccacgtaaaccgccaagcggatttttaatctcatgtgccaggccgcgcactaaatcacgggcagcaacctgctgggcgtgctgtagctgttcctgacttaagcggcgctggttatccatcggagccatctccagcaggatcatgccgtccggcatacgctgggccgtcacagaaaggatatgcgagcgcccgtcgatgaccagcgtcacttcgttatcggtaaaaccttgccccgcctccagactttcttgcatcagctcgatatttaatgagaagtagctcaacagttccggtaacggtgtaccaaacaatttgcgggagctttgggcgagcagttgttgcgcggcagggttggcgtaatggatcgccaggttgtcatcgattaacaaaatactgttaatcagcgagttgaggatctgcccagcatcgggctgcgtgcctgttgccataaagcagtctcctgaacaggttgcaccattttagtgcattatagctttttacggataaaaagcgcgaagcatcagagaattgacggagaaaaaagcccatgcagagatgggctacagatagctgacaaacttcacgttggagagcgactcacctgctccggcctaccacatcatcaccgtgtaggccggataagacgcatttgcgtcgcatccggcgtgatgtgcttgccaccgatcccaggcctgccagagacaggcgaaaagtttccacggcaactaaaacacttagacgctgtagtacagctcaaactctaccggatgcggagtcatacgcacgcggtcatcttcttcgcgacgcagagcgatgtacgcatcaattgcttcgtcagtgaacacgccaccggctttcaggaactcgcggtccagatccagttcgttcagtgcttcttccagagagcctgcaacctgtgggatctctttcgcttcttctggcggcaggtcatacaggtttttgtccatggcttcgcccggatggatcttgttcttgataccatcaagaccggccatcagcagggcagcaaagcacaggtacgggttagctgccggatccgggaaacgtacttcgatacgacgtgctttcggagaagaaaccaccggaatacggatagacgcagaacggttacgcgcagagtaagccagcattaccggtgcttcatagcccgggaccagacgcttataagagttggtggtcgggtttgccagggcgttaatcgctttagcgtgtttgattacgccgccaatgtagtacagcgcctgctcagacagacctgcgtatttgtcgcctgcgaacaggttaacgccgtttttagacagagacatgtggcagtgcataccggagccgttatcaccgaacatcggttttggcataaaggtcgcggttttaccgaagcggtgcgctacgttgtgcacaacatatttgtagatctgaatttcgtcagcttttttggtcatggtattgaagcgggtagccacttcgttctgaccagcagtcgctacttcgtggtgatgggcttcaaccaccagacccatctgttccatcaccagacacatttcagaacgaatatcctgagccgagtctaccggtggaaccgggaagtaaccgcctttcactgccggacggtgacctttgttaccaccttcgtattgggtggaggagttccatgcgccttcgatatcgtcgatagcaacgtgggaaccggagatagatgatccgaaacggatgtcatcgaacaggaagaattcaggttctggcccgaacagtacggtgtcggcaatgccagtggaacgcaggtaatcttcggcgcgcttcgcaatggagcgcgggtcacggtcatagccttgcagggtgccaggttcaaggatgtcgcaacggataatcagggtggagtcggcgaagaacgggtcaatcactgcggtggatgcgtctggcatcagcaccatgtcggactcgttaatgcctttccagccgccaatcgaggagccgtcaaacattttgccttcttcgaagaattcagcattcacctgatgagcagggatagtgacgtgctgttctttacctttagtatcggtgaagcgcaaatcaacaaacttcacttcgtgctcgttcagcatcgtcagtacgtgttcagcggacatactttaactctcctggattggtcatggtcgtcgtggtaacgaaatctgcaattattttggccgtgtcgccgtaaaaaagataaagcgaaatctgtgccaacttttaaattgcccctaaaaggcgttatcatgcgcaccatcgtgcaaaagggctgcaccacgatgtgaatgttgcaccaatatagtgcttcaatggaaacattaagcaccatgttggtgcaatgacctttggataaccctttttatgctccgtgaaagcgatcacaaagggactctgcaatacttgtttgcggaggatgtttgtgatcctgttttgtagtgcgattaatccgtgtacaataacgcgctatttctaatgcctgaggcaaagttgtgatcgaaaaattgcgtaatatcgccatcatcgcgcacgtagaccatggtaaaaccaccctggtagacaagctgctccaacaatccggtacgttcgactctcgtgccgaaacccaagagcgcgtgatggactccaacgatttggagaaagagcgtgggattaccatcctcgcgaaaaacaccgctatcaaatggaatgattaccgtatcaacatcgttgataccccggggcacgccgacttcggtggtgaagttgaacgtgtaatgtccatggtagactcagtgctgctggtggttgacgcatttgacggcccgatgccgcaaacgcgcttcgtaaccaaaaaagcgtttgcttacggcctgaagccgattgttgttatcaacaaagttgaccgccctggcgcgcgtcctgattgggttgtggatcaggtattcgatctgttcgttaacctcgacgcgaccgacgagcagctggacttcccgatcgtttacgcttctgcgctgaacggtatcgcgggtctggaccacgaagatatggcggaagacatgaccccgctgtaccaggcgattgttgaccacgttcctgcgccggacgttgaccttgacggtccgttccagatgcagatttctcagctcgattacaacagctatgttggcgttatcggcattggccgcatcaagcgcggtaaagtgaagccgaaccagcaggtcactatcatcgatagcgaaggcaaaacccgcaacgcgaaagtcggtaaagtgctgggccacctcggtctggaacgtatcgaaaccgatctggcggaagctggcgatatcgttgcgatcacgggccttggcgaactgaacatttctgacaccgtttgcgacacgcaaaacgttgaagcgctgccggcactctccgttgatgagccgaccgtttctatgttcttctgcgttaacacctcgccgttctgcggtaaagaaggtaagttcgtaacgtctcgtcagatcctggatcgtctgaacaaagaactggtacacaacgttgcgctgcgcgtagaagaaaccgaagacgccgatgcgttccgcgtttctggtcgtggcgaactgcacctgtctgttctgatcgaaaacatgcgtcgtgaaggtttcgaactggcggtatcccgtccgaaagttatcttccgtgaaatcgacggtcgtaaacaagagccgtatgaaaacgtgactctggacgttgaagaacagcatcagggttctgtaatgcaggcgctgggcgaacgtaaaggcgacctgaaaaacatgaatccagacggtaaaggccgcgtacgtctcgactacgtgatcccaagccgtggtctgattggcttccgttctgagttcatgaccatgacttccggtactggtctgctgtactccaccttcagccactacgacgacgtacgtccgggtgaagtgggtcagcgtcagaacggcgtactgatctctaacggtcagggtaaagcggtcgcgttcgcgctgttcggtctgcaggatcgcggtaagctgttcctcggtcacggtgcagaagtttacgaaggtcagattatcggtattcatagccgctctaacgacctgactgtaaactgcctgaccggtaagaaactgaccaacatgcgtgcttccggtactgacgaagccgttgttctggttccgcctatccgcatgactctggaacaagctctggagttcatcgatgatgacgaactggtagaagtgactccgacctctatccgtattcgtaaacgtcacctgacggaaaacgatcgtcgccgcgccaaccgcgcaccgaaagacgattaatttcgttttttagtcataaaaaacctgccagcgatggcaggtttttttttgcctgtcgtgagcgcacaccaatgcgagtatctcccttataagtctgtggttacgtcaatagagagctttgtcacaattatctgcaaagtcatacgccgttaattgctttcttttttggcgtaagcgtaagatgcttcatctggtttaaaccaaaaggattaaacaatggcggagaatcaatccaccgtagaaaatgcaaaagagaaactggatcggtggttgaaagatggcatcaccacgccgggtggaaaactcccttcagaaagagagctgggagaactgctgggcattaaacgtatgacgctgcgccaggcgttgttgaacctcgaggcagaatccaaaatcttccgtaaggatcgtaaggggtggttcgtgacccagccgcgatttaattacagtccggagctgtcggcgagctttcagcgggccgcaattgagcaagggcgagagccttcctgggggtttaccgagaaaaaccgtaccagcgatattcccgagacgctcgcgccactgattgcagtgacgccatcaactgaactctatcgcatcaccggctggggggcgctggaaggacataaagttttctatcacgaaacatatattaatcctgaagttgctccgggctttattgaacaacttgaaaaccactcattttctgcagtctgggaaaagtgctaccaaaaagagacggtagtaaaaaaattgattttcaaacccgtcagaatgccgggcgatatcagcaagtatcttggcggttctgcgggtatgccagcgatcttaattgaaaagcatcgcgccgaccagcaaggcaatattgtccaaatagatattgaatattggcgatttgaggccgtagacctcatcattaatctgtaggtgttttatggtgacaataaataacgcaagaaagattctacaacgtgtcgacactcttcctctttatttacatgcttatgcctttcatttaaatatgcggctggaaagagtgttgcctgctgatttacttgatatcgcaagtgaaaataatctacgtggcgtcaaaatccatgttctcgatggcgagcgtttttctcttggtaatatggacgataaagaactctctgcctttggggataaagcccgccgtctgaaccttgatattcatattgaaaccagcgcctcagataaggcatctattgacgaagccgtcgccatcgcgttgaaaactggggcatcgtccgtacgtttttatccacgttatgaaggtaatttgcgcgacgtattatcgattatcgctaacgacattgcctatgtacgggaaacgtatcaggacagcggcctgacttttacgatcgagcagcatgaagatttaaaaagtcatgagctggtgtcgctggtcaaagaaagtgagatggaatctctttccttactgtttgattttgcgaacatgatcaatgcaaatgagcatcccatcgacgctttaaaaacgatggcaccgcatattacccaggtccatatcaaagatgccttgatcgttaaagaaccgggtggcctgggtcataaagcctgtatttcaggtcagggtgatatgccgttcaaagcgttattaacgcaccttatctgcctgggtgatgatgagccgcaggtgacggcatatggcctggaagaagaggttgattactatgcgccggcgttccgctttgaagacgaagatgataatccgtggatcccttatcgccagatgagtgaaacaccattgccagaaaatcatttactggatgcgcggttacgtaaagaaaaagaagatgcaattaatcagataaatcatgtgcgtaacgtactacaacaaatcaaacaagaggcaaaccatcttctgaaccactaataagttttaactcatacgcagttaataaaaccattccatatgaatggtcggtatcttattgcctttaaaacagtgattttaaaaatcgcttaggggatgttatgctcacgaaaaagaaatgggcgttatttagtctattaacactgtgtggcggtacaatttataaattaccgtcgctgaaagatgcgttttatatcccgatgcaggaatatttccatttgaccaatggtcaaattggtaatgctatgtcggtaaactcatttgtcaccacagtgggcttttttctgtctatttattttgccgataaactaccgcgcagatacaccatgtcattctcactcattgcgacaggattactgggtgtttatttgacgacaatgccggggtattggggcatcctctttgtctgggcgctatttggcgttacttgcgacatgatgaactggccggtcttgctcaagtcggtaagtcgattgggcaatagcgaacaacaaggtcggttgtttggcttcttcgaaacagggcgtggcattgtcgataccgtggtggcattttctgcgttggcagtatttacctggtttggcagtggcttattaggttttaaagcaggcatctggttctattcccttattgtgattgccgtaggcattattattttctttgtcctgaatgacaaagaagaggcaccgtccgttgaggtgaaaaaagaagacggagcatcgaaaaacaccagtatgacctcggtgctgaaagacaaaactatctggcttatcgcttttaacgtcttcttcgtttacgcggtttactgtggcctgacattcttcattccattcctgaaaaacatctatctattgcccgttgcgctggtgggggcttacggcatcattaaccaatactgtctgaaaatgattggtggaccgattggtggcatgatttcagataagatcctgaaatcgccaagtaaatatctatgctacacctttatcattagtaccgctgcgctcgtactgttgattatgctgccgcacgaaagtatgccggtctatttagggatggcatgtacgctgggctttggcgcgatagtctttacacagcgagccgtattttttgcacctatcggcgaagcaaaaattgctgaaaataaaacaggtgcggcgatggcgttgggtagctttattggttacgctccggcgatgttctgcttcagtctgtatggctacattctggatttaaatccggggattattggctacaaaatcgtgtttggcattatggcctgcttcgcattcagtggtgcggtggtttccgtaatgctggttaagcgtattagccaacgtaagaaagagatgctggcggctgaagcttaattaatggccggatgtgcttaatccggccaacgaaaaccgtatcaaccgtaggccggataaggcgtttacgccgcatccggcagtttcacatcagaagaaatacttcgtcccgatacggatctggttttgctcgcggtggtacggttcgacgttgcggtctaaccagcgcaattcgaaataagggagccagtgttcattaatacggtaacggaaggtgttagtgatttcccaatgatgatctttcccgttgctactattaaagtcattcactcgcatgaagtaatgtggctcaaatgtataggaaaatttatcggtgattttaaaattccagtaggtgccaatttcataggtgtcattattatccagttccccgctcaaatctgttgaactatagttattatggttatagcgatttcgtactgtcagattaaaccatggtacaaatttatagttgacgtccagatacactgcaccacccgaaccgatactcttatcattaattaagccaccgggctggatggttaatttatcggttggtttaaataacggataccagccttcaatttcgttatatccatgttttagttcatcttctcgctgaaagttgtaggtattggttaacataatacccgcgcccatatcgaagttataacccacacgtagcataacctcgccctgatcggaggcaagattatatgcctccctgttttcgacgtatgcgccagcaaataccgaggcagaggtcagagaagataataaaattattgcattaatctttttcataataagtccattttttaaacgtagggaggccgccacccaccaggatggaaatagcggctattgacatttataacgttacggaagccgttttttcttctgtcgccatctctttatttttgcgttggttgatttcctcaataatcaatgcaaaccgtttttcattgagtgtgtaaaagaatcccatcgtcaatgcagcaataattgccagtgcacaaggccagataaaaatgagctgacgcaaaccctgtaatgtcgcatcgctttgcgcgatgttgggaacataaccaatttgcgtcagcataatgcctggcaagaagccagcaagtgcggcagaaattttacgaaagaaggtataaccggtataaacagaaccttcggcacgaataccggttttccattcaccgtaatctacggtatctggtaccagtgcccagttcaggctgtttacaaaggccgtgccaaaaaaggcgacacaagagaacatgacgaaagtgaaagagttacttccccagaaataattcagtatatcacccaccgcccacagcaccatgccagccagataaacctgttttttaccaaaacattttacagttaatggcaccagtaatacgccgatgaggatgcatcccatactgaagaatcccatccacgacaataaattaatatcattcagcacatactgggtgtaatagacctgaatcgccagtttgatattaaatgccgccagggtacacaagttagcaatgcataaaaccagcaatggcggattccgaaatatcgcgcaaaatgatttgagaatactggctttatgtccggttggcgttgtgtccacataatgctctttgacgcctctgtagcacagcatcataaaaataaagccgccaatggagaacataagtgccgcacaggcataaccgacggttgagtcagaaaaaagcgactgcaacggaataaacgccacggtacaaatcaatagccctatggttgcaccaccctggcggtaagccgcgagctgcgcgcgctcattcgggtttttggtaattgccgggatcatcgcaccatacgagcagttcatcagactgtatgaaagtccaaacatcataaacagcgcggtggcaatcgtcgttttaaccggcaaacaaaaggtggtggcgataaactggagcgttgcaattaacgccgccggaaccgctgcatataaaataaagggacgaaatttgcctttaggcccaatatttttccgcgagtcgagtaaaaatccggtgagcatatcggtaaacgcggtaaaaaacttcgccaccagaaagataatcccgccatagtaagcaggcatccctaattcatcggtataaaatttgaggagatacagagtaccgatgcagagcattaaattcgaaccgacgtcgcccataccataggcgattttttcccgcagattcagttttaatgtcagtggattatggtcagacataatcactccttataacgccccgcagggcgtcgtttattattattacgccgtgcgtttacgggcttctatctcttccacaatgcggacatacatcttctcgttcaggctgtagaagcaacccatcgccacaatggtgactaccgccagtgcgcttgggtagatgaagatcaactggcgtaacccttcaatggtgtggtcagcctgtgcgacgttcggcacatagccaatttgcgtcagcatccagccggggaagaaaccagccagcgcctgagacactttgcgaaagaaggtaaaaccggtgtagaccgttccttccgaacgcacgccggtgcgccactcgccgtactcgacggtgtcggaaaccagcgcccagttcaggctgttaacaaacgctgagccaaagaacgccaggcaggagaacgccacgaagctgaccgaaccgccgccgaagaaatagttgagcagatcgcccagcacccaaatcagcaggccgccgatataaactttcttcttgccaaaacgtctgactgaggcaggcatcaggaatacgccgatgaaaatacagcccatgctgaaaaatcccatatacgacaacaggatgggatcgttaagcacgtactgggtgtaatagacctggatggcgagcttgacgttaaacgcccctaaagtgcagaggttggcaatgcacagaatgaacagcgggcggttacccgcaattgcgcggaaagattgcagcaggcccggcttttgcgccggattagcaggctgggtttcgacataacgctctttcacgcccgagtagcagatccacataaacagcaggccaaacagtgaaaacagcgtggcggcgaagatatagccaagttgctgattaccttcgataagattcataactggcacgaatcccaccgtgcacagcagcaggcccagcgtagcgccgccctgacgccatgccgccagtgaggcgcgttcgttggggtttttggtgatagcgggaaccattgcgccgtaggagcagttcatcatgctgaaaaacagtccgtaaagcataaacagaatagtggccatcaccgttttaccggtgacatcaaacggtgtgccgacaaagttggcgatcgccagtaaggtgaccgggaatgacgcatacagaataaaaggacggaacttaccttttggaccgatcttgcgtcgggaatccaacataatgccggtacccatatcggtaaacgcagtaaagaattttgaaatcaaaaagataatgccgccataggtgcctggcagccccagaacgtcggtataaaacttcaaaagataaagcgtaccgatatccagcaggatgttagaggccaggtcgccaataccgtaagagagtttctctttaaagggcaggcgtaaagttgctggatcttccgttgtgatgtgactcatcgatgttctccctttgcccatgagtttccccacgggcggatgtgattagatgctttttaacgacgcgaacagtgccgcccattcgctatcggcgcgataaaagaccggcggcttgccgatgggcgcattaacggtaacttccccgccccggaacgcttcacccgtccaggcgtggacccagttatcctccggcagatagagcgtccagtcgctacggccttcttcatgcaccggagcgaccagaatgtcgcgacctaacaggtactgatatttcagggtgtaagtgtgcgcatcgtcttcgtaatgcaggaacagcgggcgcataaccggcaggccggacttcgcattcagcgcgacggcctctttcaggtaaggtttcagggtggtgaagacggtggtcatacgggcgaaatgggcgatggtttctgcgtcgccgtcaaactgccagttgtcgccaggacggttaccttcgtgggtgcgcatcatcggcgtgaaggcgctgaaatcgcaccagcgcagcagcagctctttgctgcgcttcatctcaaacagggtggtgtaaccgccaatgtcgctgtggtgcaggccatgtccggtcattgccagcgacagcgccgccgggacaaccgacgccaggccatcgtcgagactccagtcgacgttctggtcgcccgcccacatcatggtggagtatttctggctaccggtagaaccggcgcgcataaagaaaaggatctcgccgagcttgcccgtttcttcaagggcttcgtagttacacttcgcccacagcgcaggccaggcgttatgcataatttcggcactgacgccgttatgcaggtacgtgtcggtgggcagatactcgccgaagtcagccatccagccgccgcagccgagttcaatcatgttctttttgatcacttccttgaaccaggcgtaggcttctggattagtgagatcgacaacgccgccgtaaaactcgccaaactccaccagatagtcaccgccagaggcatcttttgccagatagccgtgttgtgccgcttcttcgcagagatctttatcgctggcaacatacgggttgatataggccaggaactgcacgccctcctgattccactgcttaatgcgtgaatccagttgcgggtagttttcgctgttccacttccagttccacatcacgcgtttgccaaaagaggtcatacgaataccggaccagtcctgcgcccagatgccgttgaccttcacgcccgcgttaggcatggtgtccagtttcttctggcacacttccgtcccgccctgaatgccgagcgttactccgtcataaatccagtcgggcagttctggctggcgtcccagcagggcggttaatttttccagcagggaaatgtatgtgtcagcacattcaaaacgcagcgttgctttgtcttcccacagcgccagttcatggtattccggggcactaaagtcgaagttcatatagcaactgttatcaacatggcagtaatacttctgcgtgctgacaaacgtaggctgtgggaagaaagtccagtaatagtcgccgcccgcattttctttgcagtcggcctgccaggtgacataggtttgtttgttgcgaccaacgccttgttcactggtccatagcgggaacggtttgccacgcagatcgaagtaggaaaactgttcgccgcagccgtagatatggtcctctggttgagcggcaaggcgcagccagatacggttgtggttaaggttgtcgttttgtagttccagcaataaacgcccctgatcgtcggcagagatattcagcgtggcgctaatgtcagaaccacggctgaaatgaattaaccaaccatccggtgactggctgacgatggcgtcggtaagcgcaattttctcctgtagtttatctttaatgctgaaattaccgcggaacatatcgatatccgctatacctgagccaatccataaacaaggattatctttgctatgggttaaaataagacgttgttgaaaatgtagggtaaaactgtcgttattctgatgaaattgaaaatctaataactgtggacgtggcgtatccataactaatctccatagagttgagaacgagattgttgccttcctgttattacaggcttatgtaaaatgattctcataaaactgatatataaaaactttacagaagctgagctgtttttaacttaataaattgaagatacataatgttgcctttagcgagtgaaatgttcttcaatgattttgactgctaatcaatacaagttattttctctgtccgtaaatattaaaaaacaggcggtgcggttttcctgattccagtaataataagtcgatacctgaattaaaggcgttaggcgggcaactcataggttcaactgccagtccctgacgctgtaatttttcaccgctataaacctgcacccagagttgatcggaacaaaggcttaccgaaagcgcctgctgtggatgggtaatggtcatttcccacaaatcattagcggttttaaaggtgtggtcgatttttgtcgcggctatttttttcgcctgcgtgaaatttaaatccagctcatcaacgtggtgaagcgttgtcggattcgcgtgctcatcgacggcataaacctggtttgccggaagctggaacagatattcatcaacagatgttaagttgcaggttaaataaggatgaatacccacgccataaggcgctgcgacagtgccgatattctggcttgcgatctcaacggaaagacccgtgtgtgcgttgagcgaataaacaacttgtgaagccagcataaacggatagccgtaactgggcggcagaaaagctgtcagggtaacgctggtggcggttaattcactaatttgccagtctcgccaggcaagcagcccgtgaatagcggcttttgaactatgttcattaatgggtaactgatattcctgcccctgatagcggtaacagccgttggcgatccggttcggccacggaataagcactttacccagatgcgccagcggcatctcttcgggtttgtgcgggatgactaaatgacaaccctgaaaggttaattcagccagaccagcaccgacggtcacaatggtcgcgtgataatcccccgcggcaagtgaaacggtctgtccactgcaatgcatattggtgatttgcatacaaggcaccttaattaacgacatacagcctcccgtgaggctgatgtcaaacccaaaaactgcaccggacggtcccctcgcccctttggggagagggttagggagaggggaaaacccgcaccctattttcagatcagttatttcgcattaatatccagcagacccgctgcaaccgctggagccatgccgggcgctaacgggatacgcgggatcaccaggcaatgcagcaggtgataaatatcctgtttgccgtcccagactttggtggtgaccttattgtccgcatccagctcctgccaccaggaaccattttcatagtccatcaggtacttaatgcagtactcccaccatgtttgataccaggtttcatactggcgatcgccagtgacggtgtagagcgcgtaggccgtacccattgcttcgacgataggccaacgtacacgttcgcggaccaccggttttccttcccagtcaacggtataaacaatcccgtccgcgccatcgggtgcccaggcatcgcgcacggtggcgttaaacagacctttggcatcttctagcagccatgctggtggttgttcgcaacgggcttccagggcagcatggatgtgcagcattaaacggccccattcgatccagtggcctggtgtacctccgaacgcgcggaagcgatgcgccgggttatctttgttgtaatccggcagcggattccactgggtatcgaagtgttcgttaacgcgataatgattatttctggcgacgtcgtggataatcacggaagccacgcgaatcgcgcgatccagccattttttgtcgtgagtgacgtcataaacaatcaagaaagcttccaccgcgtgcatattggcattgccgccgcggtactcttcggttttgctgaaggcttcgtcccaggattccaggcacatctgctcttcttcgctccagaaatatttctcgataatttcaatggtgtaatcgagcagcttgcgcgcttccgggtgacccgttgtgacggcgctggcggcacccagcagagcaaagaagtgttgatagccctgtttggaggcatccaccacgccctcgtcattcacgcaggcataccagccgccatattttttatcacgcagtgcgccgttcatggctttgataccgtgatcaaccaacgagtaagcgccaggtcgacccatcgccgcagcaacggaataaacgtgcaacatacgagcggtgatccacagatgggtgcccatctcttctttgatttgccctttattgcctaaccagccaaaaccagtcggcactacggaatttttaccaaaatcaaagatgcggtcggtttcctgttccagccaacggttgtggcttagggtgttaaaccatttcattccttttatcctcatcttagcggcgtttagccatcatttcgtcgacgatatcgccaagttgttgtaatttcggtgcgcaaacgtcacgcagcatcagctcgttgtctggtaaaccgacgaccgatgcccagactgcacggcctgccaggaatcccgatgcgcccgccgtcattgccacgcgtacggcacgcgggaacagtttttcgtcgacaccggaagagaggatcacccatggcatattgatatggtcattcagacgttgtgaagcacagagaagctcttgttgcggacctttgccataaagcggcatttcaactttgtagaggtcagcgccactgtcgcccagctctttggcggcatcgatgatcgcttgttcgcgatcgaatttatcgccacgacgcggtgggcggacgactggctcaatgatgcttaccagaccgtgtgagtggcacagttcgttgaactctttcaccatatccagacgttgctgcgcatcttcatcactacgccacagcaccagcagttttaaggctttgccaccgtcttgtttgatctgtagcggattgattttgcggtcaataaccacgctatcgaccggaataccgttgccaggaatgaactcatcggcggcgacaatcatggcgcaacttttggcaatcgcgttttgctcaaccacctggcggtagcagaattgttgatctaccagaatcgccgaggcataaggcgagagggcctttgcagcgttaactttgaaatcagttaaaacgctatcggctaccggagcgggtgccccagccgcggcaaacatcatgcgcatggcttcgcgctgatcgaccgccagcatggcaaaaccgcccgatgcgcgcgtaatgtcgttgatggtgtacttattcattcatttattcctttatccagtcgttacatttttactttggcagtcatcccggcactgacacggacctgttccagaatggcggaccagtcctggcgaccgcgacccgctgcgcgcgcctggctataaacctcccgtgaggcggcccccagcggcattggcacatgcagctggttggcgacatcaagggcgatgccaagatccttatgggcaagatcgatcatgaaggcgggagaaagatctccgctgaggactttgtttggccaggaagtggtgaagtgacctttaccggcggcggtaccgctcatcactttgacggcaacatcgaagggaagattcagggcttcgcacaaaacggcggcttctgccgaaagcgcattgagcgcgatgctcatgtagttgttgatgagcttaacgcggatccccatgcccggaccgccagcgttgatcaactcactgcccatcgccatcaggatcggtgtggcacgttcaacttgttcagcggtgccgccagccagcagtaacagagtaccggtaatggcatttgcagaagtacggcctaccggaacatccatcatgctgaagcctttggcttgcatatcggcaatcaatttatcggtttgcagcggatggatggtggacatatcaatgaccagcgcatcggtagataagccttcgcaaacgccgttttcaccgaacaacacgttgcgcaccagatcgccattcggcaacatggtaatgataaattcggcatctttagcggcctgcgccgggttggcggcgggagtcgcacctttgtctaccagatgccgcacagcttcggcgttcacatcaaagacgcgaagttgatgcccttgctgcaataaattgctcgccattggcgaacccatttgtcctaaaccgataaacgcgattgctgccataaccctctcctgaatacagtgatgtcactttttgtcatttatgacatgctttgcttgtctgtttttgatcgtatttgtaatttatcgtcaaaaattgacagccgtcactttttaaacaattggtgaaattaaaatgaacgcatcccaaaatgtttaaggaatgaccatgattcgtgttgcttgtgtaggtataaccgtgatggatcgcatctattacgtggaagggttaccgacggagagcggtaaatacgtggcgagatattatacggaagttggtggcgggccagcggcgacggcagcggttgcggcggcaaggctgggggcgcaggtcgattttattggtcgcgtaggtgatgacgacacgggcaacagcctgctggcagagctggaatcctggggcgttaacacccgttacaccaaacggtataaccaggcgaaatcttcgcaatccgccatcatggtggataccaaaggcgagcggataatcattaactaccccagcccggatctgctgcctgacgcagagtggttggaggaaattgatttctctcagtgggatgttgtgctggcagatgtacgctggcacgacggcgctaaaaaagccttcaccctggcccgtcaggcgggtgtgatgaccgttctggacggggacattacgccgcaggatatcagtgagctggtggcattaagcgatcacgcggccttttcagaaccgggtctggcgcgcttaacgggcgtgaaagagatggccagtgcgctaaaacaggcacaaacgctcacaaatggtcatgtctatgtgacccagggtagcgcaggctgcgactggctggaaaatggtgggcgtcagcatcaaccggccttcaaagttgatgtggtagataccacaggtgcgggtgatgtttttcacggcgctttggcggtggcgctggcaacaagtggggatttagcggagtcagtccgcttcgccagcggtgtagcggcgttaaaatgcacacgtcccggtggacgagccgggatccctgactgtgatcaaacccgatcttttttgtcactttttgtataaaatgccagggtgatggtttttcgaggaattttcatgagccttaccgaactaaccggtaacccgcggcacgaccaactcctcatgctgatcgccgagcgtgggtatatgaatattgatgagctggcaaatctgctggatgtctccacgcagacggtccgccgggatattcgtaaattaagcgagcaaggcctgattacgcgccatcacggtggcgcgggtcgggcttccagcgtcgttaatacggcgttcgagcagcgtgaggtttcgcaaaccgaggaaaaaaaagcgattgccgaagcggtggcagactatattcctgatggttcaacaatatttatcaccattggtacgactgttgagcatgttgcccgggcgttacttaaccataatcatttgcggataatcaccaacagcctgcgtgtggcgcatattctttaccacaacccgcgctttgaagtgatggtgcccggcggtacgttgcgctctcataatagcgggatcattggcccttcagcggcgtcctttgtggctgattttcgtgctgattatctggtaacaagcgttggggcgattgagagcgatggcgcgttgatggagtttgatgtaaacgaagctaacgtggtgaaaacgatgatggcgcacgcgagaaatattctgctggtcgccgatcacactaagtatcatgcttcggcggcggttgaaattggtaacgtggcacaggtcactgcgctctttaccgacgagctgccgcccgctgcgctaaaatcacgcttacaagacagccaaattgaaatcattcttccccaggaagacgcgtagatttttgtgaccgttaacctggcttcataccttgccacatagccaaacccatcctttcccgctacagttaatttcttgtggcgcgaaaggaggcaaaaatgctctatatctttgatttaggtaatgtgattgtcgatatcgactttaaccgtgtgctgggagcctggagcgatttaacgcgtattccgctggcatcgcttaagaagagttttcatatgggggaggcgtttcatcagcatgagcgtggggaaattagcgacgaagcgttcgcagaggcgctgtgtcatgagatggctctaccgctaagctacgagcagttctctcacggctggcaggcggtgtttgttgcgctgcgcccggaagtgatcgccatcatgcataaactgcgtgagcaggggcatcgcgtggtggtgctttccaataccaaccgcctgcataccaccttctggccggaagaatacccggaaattcgtgatgctgctgaccatatctatctgtcgcaagatctggggatgcgcaaacctgaagcacgaatttaccagcatgttttgcaggcggaaggtttttcacccagcgatacggtctttttcgacgataacgccgataatatagaaggagccaatcagctgggcattaccagtattctggtgaaagataaaaccaccatcccggactatttcgcgaaggtgttatgctaaaaaccattcaggacaaagccaggcaccgtacccgtccactatgggcctggctaaaactactctggcaacgcattgatgaggacaacatgacaaccctggcaggtaaccttgcctatgtgtcgttgctctcattagtgccgctggttgccgttgtttttgcgcttttcgccgcttttcccatgttttccgacgtcagcattcagttacgtcactttatttttgccaactttctgcctgctactggcgatgttattcagcggtatatcgaacaatttgttgccaattccaacaagatgaccgccgttggggcgtgcgggctgatcgtcaccgcgttattgttgatgtactccatcgatagcgcgttgaataccatctggcgcagtaaacgagcgcgaccaaaaatttactcgttcgccgtgtactggatgattttaacgctggggccgctgctggcaggggccagtctggcgatcagttcctatttgctctccctgcgctgggcgagcgatctcaatactgtcatcgacaacgtgctgcgtatttttccgttgctgttgtcgtggatctccttctggttgctgtacagcattgttcctaccatccgcgtacctaaccgcgacgcgattgtcggcgcgtttgtcgccgcactcctgttcgaagcaggaaagaaaggtttcgcgctttatatcaccatgttcccgtcatatcagctcatttatggtgtgctggcggtgatccccattctctttgtttgggtctactggacatggtgtatcgtcttgcttggcgcggaaattactgtcactctcggggaataccgcaaactaaaacaagcagctgaacaagaagaagacgacgaaccatgattgcattaattcaacgcgtaacccgtgccagcgtcaccgtggagggagaagtgacgggcgaaattggcgcgggacttttggtgttattgggtgtcgaaaaggatgacgacgaacagaaagcaaaccgtctgtgcgagcgtgtgctcggctaccgcatctttagcgatgccgaaggcaagatgaatctcaacgtgcaacaggcgggcggcagtgtgctggtggtttcccagtttaccctcgccgcagataccgaacgggggatgcgcccaagtttctccaaaggtgcatcaccggatcgcgcagaggcgttatatgactatttcgtcgaacgctgccgtcagcaagagatgaacacgcaaacaggacgcttcgctgcggatatgcaggtatcgctggtcaatgatggccccgtgacattctggttgcaggtatgagccagcttccagggttgtcacgggaaacaagagagagtatcgctatgtatcaccttcgggttccacaaacagaagaagaattagagcgttactatcagtttcgctgggaaatgttgcgtaagcccctgcatcaaccaaaaggttcggaacgcgacgcgtgggatgcgatggcgcatcaccagatggtcgtcgacgagcagggtaatctggtggcggtaggccgactgtatattaatgccgacaatgaagcgtccattcgctttatggccgttcatcccgacgtgcaggacaaagggttaggcacgctgatggcgatgaccctggagtcggtggcgcgtcaggaaggcgttaagcgcgtgacctgtagcgcccgtgaagacgcggtggagtttttcgccaagctggggtttgttaatcagggagaaatcaccacgccaaccaccacgccgattcgccattttttgatgattaagcccgtcgccactctggatgacattctgcatcgcggcgactggtgcgcgcagctgcaacaggcgtggtacgaacatatcccgcttagtgaaaaaatgggcgtgcgcattcagcaatataccgggcaaaaatttatcactaccatgccagaaaccggcaatcagaatccgcaccatacgctgtttgccgggagtttattctcactggcgacgctcaccggttggggacttatctggctgatgctgcgtgaacgccacctcggcggaacgattattcttgcggatgcgcatatccgctacagcaagccgattagcggtaaacctcatgcggtagccgacctcggtgccttaagcggcgatctcgaccgtctggcgcgcggacgaaaagcacgggtgcagatgcaggtcgaaatctttggcgacgagacgccgggtgcagtgtttgaaggcacgtatatcgttctgcccgcgaagccatttggcccgtatgaagagggcgggaacgaagaagagtagctgatggagaggggcggtgctgcctctctcattcaggtcatttatattagtccttggctatttcggttatattaaataagaactctataaatttttattcttcgttggctccatacgtgtcttgctacatcactgttcaggagcatttaaatattatttgtagaactgagtggcaattatcgcagataatgcttaattcatcatcttagttcatgtttgagcgatttttgatagtcaaaaccccctctggtgccatacttttctcataaatatttttaaaatctatagctaacaaatattatgcaaagataatggactagcatcattgtcagtatcattcatttactgctctgtatgttatgaataattatgttgtatgtttgctcttaaaccgtgggaaggaggctataatggttgccaatattaatctcattaaacaagaaagttattctgttgttaatttagaaaaacaactttcccgaactgttaccaacaaaattataacgatgagcaagtaaagaccggttggtggcagtactgaccggtctgtgatgaaagattaatttcaccttaaatcctggtgctgttaggatgctgacgtttttcggctacaccattcagattatgcaaataaatatctctgaatataatatattcatagcacccataattcatcctgggcgataactaaaccatttttgagtaataaatgaaacaactgcaacactcttattatttctggaaaacgcctcgcaaaaacaaaacaacatgcaaaaatccgctttttttaaatgattttccggcgtaattttcgcacatacattaatgagtaatatatgtaaggtattggtaatggcgatgaatacggtttttcttcatttatcagaagaggcaattaaacggctgaacaagcttcggggctggcgtaaggtttcacgatctgcaattttacgcgaagcggtagagcaatatctggaacgtcagcaattcccggtgcgtaaagcaaagggaggcaggcaaaagggggaggtagttggtgttgatgatcagtgtaaggagcataaggaatgacaaaaatttttcattcttgaatataaaaaacagatgcccttattctggtattaatacaaggctgttttacttgaacttataataactgcaactgttacatcatatctggaaaacgcctcgcaaaaataaaaaatgatgcgtaaatgagctttctttaaagattcggcaagggtacttttctctccatagattcaaaaatgatattggcgagatatttatgaactctctggcaggtatagatatgggcagaattttactcgatttatcgaatgaggtgattaagcaacttgatgatctcgaggtgcagcgtaatcttcctcgtgcggacctattaagggaagcggtagatcaatacctgataaatcaatcgcaaacagcaagaaccagtgttcctggcatctggcaagggtgtgaggaagatggtgtcgaatatcagcgtaagctgcgcgaggaatggtaatgggaaaaaatgatgtcaatcagattgctgacaacgtgcgcgttgttcatgccggatgcggcgtgaacgccttatccggcctacaaagtcgtataaattcaatgtattgcagtttattggtaggcctgataagcgcagcgcatcaggcaatcttacgcttgtcatcagtctcatgcccataaccttattgatgtggtggtgggtaaattgaggccaaaccggcactggcggcatagcttgaggtggtaacgcggaatacgagagatggtgtcgtcacaccctatgagctgtaatccgggcgacctgcgccacccggaaaacgtcagagattactctccttcacccggaaacaggaacgggttgatggaactgcgggcatagccttcttgctccattcgtgcgtccagtaccagagaggcgaggtcatctgctacggcttcgatttttggatctttttcctgatagagaattttcaggtaagtgtcgcagtcatcgcagctttcggctttaatcgcggcctgttcgtcatccagcgaccagtaatgcagtttgccgctctgctcgcagttgctgcattttacgcgcactacgtgccattcagtttcacacaggttgcagtgcaggtaacgtagcccctgagtggtgccaatttgcaccatgctggacaccggcatagaaccacaaaccgggcaatattgacgttgctcgccgtattcagcgcgggctttgccggggatcagattggccatctgcgcccagtagagcgacagtgcagcccagataaacggcgctttatcgctgctgacggacgagaaatcagaggcaaacagcgcgctggccatatcttccagctcctgagtcgatgccttctccagattctcaatcactgccagcgccgggccgctcatttcaggtttcagctcagcaatcagcgccatcagcagcttttgccagtgcttatcacgcggcagaacgtgaatatccagcgggggcttgccttgtgcgctggcttctttaatgcgcgcagtcagatccatctccagcggatggtcgtacagcaccacttcctgggcgtgggcgataagcgcagcaaagcgcaggtaatcacccagaggattattttctgccagctcgcgcagacgctcggcgcggcggttgtataaattcttgagccgagggaacaataacggcggaatcatatccgccgtacgtttctcgcttgaacccagctcatcttgcgggattatgcgaatactcattcagctttcttttccgttgtcttgcggacctcacggtaccagcgcgggtgatgtttcttcgcccaggcgctggtaacccatccttccaccatggcggtaatcgtgcctttcacccaaagggcggcgtagatatgcaccatgataaccacaattaacgccactgcggcaaatgaatgcagcattaacgcgaatcggatcaccgggattgagaaagcaggcgcaaaataaggacgccagataatcacgccgctcaccagcagcagaaccaggaaaataatcgccgcccagaaaacgcatttctgaccgaagttataacgcccggtgtcacctacttcctcgttgacgacgatcttacgaatattcttcgcccaaaagatatcatcccgattgattaggttgtgatgccagtaacggaaaaacatgatgatgaacgaggcaaacataaccacgccgacaaacgggtgcagaattcgcgccagctgcggtgtgcccatgatttgcatcaaccagttgaaggacgggaacaaaaagcccagcccgctcaccgccgccaggatgaagcagaaggcggtgatccagtggttgatacgttccggcgcggtgtagcgcacgatggtgtcacgtcgtttcatttgcgctcctcgtctttctcttcgtgcagattattctcttcctcatccgcacggttcggaccgacacccacgtagtggaagatactggccgcaaaggtagccgcaaagccaacagccgcgagcggtttccagatgcctttccagaatttcacggtttcgctgatttccgggttctccggcaagccatgatacagatttggcttgtcagcatggtgcagcacgtacatgacgtgtgtaccaccgacgcctgccggatcgtacagacccgcattgtcgtaaccgcgggttttcagctcagcaacgcgctcgctcgccagcgttttcatcgactctttcgtaccgaagtgaatcgcgcccgttgggcaggtcttcacgcaggctggttcttgcccaaccaccacgcggtcaacgcacagcgtacatttgtagacgcggttgtcttccgggttgaggcgcggaatgtcgaacggacagcccgcaatgcaataaccgcagccaatgcactgctcggactggaagtcgacgataccgttggcatactgaataattgcaccttccgccgggcacgctttcaggcagcctggatcggaacagtgcatacagccgtctttgcggatcagccattccagtttgtcgttctgctccacttccgagaagcgcattaccgtccacgatttggcgcttaaatcattggggttgtcgtacaccccaatgttattgccgacggtatcgcgaatgtcgttccactctgaacacgccacctgacaggctttacagccgatacaggtggtaacgtcgatgagtttcgccacttcttcctggaagtcccgcgcctgaggcgcgggggtcagaccgttagtcgcggaacgacgaatgatatcttgagattgataagccatatgtcgtctccgttacaccttttccacattcacaaggaaggacttaaactccggcgtctgcgtgttcgcatcaccaacgaatggcgttaaagtattggcaataaagccttttttagctacgccttcatagccccagtgaatcggaataccgatggtatcgatatctttgccgttcgctttcagcgtgcgaatacgtttggtcaccaccgctttggctttgatatagccacggttggaggagactttcacggtatcgccctgggcaatgccaagtttattcgccagcgactccccgatttccacaaactgctctggctgcaaaatcgcgttcaacagcgcgtgtttggtccagtagtggaagtgctcggtcagacgataggtggttccgacatacgggaacttatcggctttacccaatgcttcggcgtcgtctttaaagatacgtgcagccgggttcgagataacgtttggatgcagcgggttagttcccagcggcgtttcaaacggctcgtagtgttccgggaacggaccttccgccatcttatcgagggcaaacagacgccccatgccttcctgctgcatgataaacggcccgacgccgctacccggaggcgctgcgctgtagtccggaatatcccagccggtccacttagtgccgtcccatttcagcaactgacgcttcggatcccacgggttaccctgcggatctgcggaggcgcggttatacagaatgcggcggttaagcggccatgcccatgcccagcccagcgtgttaccgaggccagacggatcggcgttatcacggcgtgccatctggttgccttccggcgtccagctaccggcgaaaatccagcagccacaggaggttgtaccgtcatcgcgcaattgggcgaacgaactaagttgttggcctttcttgacgataaccgcaccggttgccggatcggtaatatcggccagcgccttaccgttgctctccatcgccacttcttctgaagatggctcatgcggaatggcgtagttccatgtcatgttcagcacctggtccgggttcgcgccaccctgttcggcatacatcttgcgcaagcgcaggaagataccggagaggatctcgccgtcagtcagcgcaatccccggggcgtccgcacctttccagtgccactgtaaccagcgacctgagttaacgatagaaccgttctcttccgcgaagcaggtcgatggcagacggaacacttcggtctggatcttcgacgagtcaacttcgttcagctcaccgtggttctgccagaagttagaggtttcagtgttcagtgggtcgatggtgacgaggaacttcagtttcgacagacaaccgatcactttgtttttgttcgggaatgaggcaacagggttaaagccctggcagatatagccattgaccttgccctctttcatcatctcgaagtattgcaggacgtcgtagcctttatcccacttcggcaaccagtcaaagccccagctattttccgccgtcgctttatcaccaaagaaggccttcatcatagagacgaagaatttcgggtagttgccccagtagtttacctggccttccagcagcggttttggcgtgttggcggtaaggtaggtttgcagatcggtctgcttctcgcttggcagcgtcatgtaacctggcaggctctgcgacagcagccccaggtccgtcagcccctgaatattggagtgaccgcgcagggcgttaacgccgccgcctgccatccccatattgccgagcagcagctggatcatcgccatcgtacgaatgttttgcgcaccaacggagtgttgcgtccagccgagggcatacaggaacgaggcagttttatcgtgagcactggtttctgcgatgtattcgcagactttcaggaacgcgtcttttggcgtaccacagatgttttcaaccacatctggcgtgtagcgggaaacgtgctgtttcagcaagttccacacgcagcgcggatgttgcagcgtggtatcgcgtttggcgaagccgttttcgtccagttcataagtccaggaggatttatcgtacttgcgtttttccgcgtcgtagccggtgaacaggccatcttcaaagccgtaatcctcacgcacgatcaggctggcgttggtataggcttcggtgtattcgcggttgaatttttcattgttcagcaggtacagcaatacgcctgacaggaaagcaatgtcagtaccggaacgaataggggcatagtagtcagctaccgccgccgtacgcgtaaagcgaggatcgatcacaatcagcttcgcgccgttgtgaattttggcttccatcgcccagcggaacccgaccgggtgagcttcagcggcgttaccgcccatcaccacgacgaggttggcgttcttgatgtcgacccagtggttggtcatcgcaccgcgaccaaatgttggagcaagacttgctaccgttggtccgtgtcagacacgcgcctggttgtcgaccgcgagcatacccagcgcgcgggagaatttttgcgttaaatagccggtttcgttactcgacgcggaagcacacagcatcccggtggagagccagcggttaacagtcacgccttcggcgttttgcgcaatgtagttagcatcgcggtcttctttcatcagtttggcgatgcgatcaaacgcctcttcccaactgatttgctgccatttatcagaacctggcgcacggtattccggaaacttcagacggctttcggagtggatgaaatccaccaggccagcgcctttcggacaaagtgcaccgcggttgaccgggtgatccggatcgccttcgatatggaagatagatgctttggcgttttttgctccgtcaccgaggctgtacatcaacagcccacagcctacggaacaataggtgcaggtattacgggtttcgcgggtgcgcagcagtttatactgccgggtttccgcgagtgctacgctgggtgcaaaacccagtgccgctgccgtggtgcctgccataccgccagcgcagatcttaaagaactgccttctgctgacctgcatggattgctccttgtttcgacattgtcacgtcccatttacattcgcttgctgcgtgtgcagggagtgggagttatttttctttgcggaaggggccgcaaaggtccagaattggctcaatttccctccatccaggaagggtttgtaacagaataccataatgttggtgtgtgtgttcttatctggttaagagaaagtgaaaaaaacacagcgaaaagaaatcgaaaatgtgacaaatatcacaggtgttcgtcaaattgagttatggcggcgtgatgatttacaacacccacggttagatgaggtcgcggaagaagttcccgttgcgctggtctacaacggcatttcgcatgtggtgatgatggcgtcgcccaaagaccttgagtactttgcgctcggtttttcgctttccgaggggattatcgaaagtccgcgcgatatcttcggcatggatgtcgttccttcctgtaatggtcttgaagtacaaattgagctttccagccgccgctttatggggttgaaggagcgccgccgggcgctggcgggacgtacgggctgtggcgtatgcggcgtggagcaacttaatgacatcggaaaaccggtgcagccgctaccgttcacccagacgtttgatctcaacaaactggatgatgcattacgtcatctcaacgattttcagccagtggggcaactgactggttgtactcacgccgctgcctggatgttgccatctggcgaactggtcggcgggcatgaagacgtgggtcgccatgtggcgctggacaaactgttaggccgccggtcacaagaaggggaaagctggcagcaaggtgcggtactggtttccagtcgtgccagttatgaaatggtgcaaaagtcggcgatgtgcggcgtagagattttgtttgcggtgtctgccgcgaccacgcttgctgtagaagtggctgagcgctgtaatctgacactggtaggtttttgtaaaccgggtcgggcaacggtttatacccatccgcagcgtttgagcaattaattaaaataagtcctgcgaaatatattaaattgcaggacttattcatttcgtgaattttattattttatttataaacaaaatgcgtgtagtggcgttttcttttttcatttattatgttcactctcttatctatatatttataaggcaattaaatgaaaaggaatttattatcttccgctattatagtcgccatcatgtccctcggtctgacgggttgtgatgataaaaaagccgaaacagaaacgctcccgcctgccaatagtcaacctgccgcaccagctcctgaagcgaaacctactgaagctcccgttgcaaaagcagaagctaaacctgaaacacctgcgcaaccggtggtcgatgaacaagcggttttcgacgaaaaaatggatgtctatatcaagtgctacaacaagttacagatcccggtacagcgcagtctggcgcgttatgctgactggctgaaagattttaaacaggggcctaccggtgaagagcgtactgtttatggcatctacggcattagtgaatccaacctcgctgagtgtgaaaaaggcgtaaaaagtgctgtggcgttaacgcctgcgctgcaaccaattgatggcgtggcggtgagttatatcgatgctgccgtggcgttgggtaataccattaacgaaatggataaatattacacccaggaaaattataaagacgatgcgtttgcgaaagggaaaacgctgcaccagacattcttaaaaaatctggaagcctttgaacctgtagccgaatcttatcatgcggcgattcaggaaattaatgataagcgtcagcttgcggaactgaaaaatattgaagaaagagaagggaaaacattccactactactctctggcagtcatgatttcagcgaaacaaattaataacctgatatcgcaagataagtttgatgcagaagcggcaatgaagaaagtgtctgaactggaaacgctagtggcgcaggccaaagaagcggataaaggcggcatgaatttctcgtttattaattcggcaggccagtatcaactcgaggctaaaaaatacgttcgccgcatcagagataaagtcccgtactctgactgggataaagagcaacttcaggacgcaaactcaagctggatggtcgaagactctttcccgagagcattacgcgagtacaacgaaatggttgatgactataatagcctgcgttaaacgtttttgatgataaatgcagtgtcggatgcggcgcatccgacacagttcaccccttgtgaagtaactccataaatgcctcatatcctgttaacccggcaataatctccgccggatgctgacacaatatgcttgccagatagctaaatatttttagctcatgacgcgcatcggcggcggcgcaggcgatcaagacatggttaatgacttcgttattcacctcaactggttgggcgagggtaataaaaaatccacgaaaacgtcgctcctgttcgctccagcaatgtgggatggcgaggcgattaacaatcaggttttcaccttcgccttcgcgggcgatgatgcgttgtgcttcatcggcggtaatatggtgttgtgcgactaattgcgcacaaatttgccgggtaatatgttgccagctttcaccgcgtacattcgaataatgaaaacttccgggggcagagaaaaaacgctccggctgttggcgaataaatgccgtcgccagaaaatgttttatttgttcgataccggcagccgtaatgatattttttacggtgatgtaattatttaccgcgtcatccagtaaataatggctgttgttaatgatcaataacggctcaatctcttcgcgaatggcaacaagttcgcttaagctacgggcaataattacccgacaatttaaaacatcgcgctcaatggcgagctgattaatagtggcaatcgcgttctggtccgagagcaaaatgatcggctggcgttcgttttgatgccgctccagcgcacaggcaaaatacaaaccgatcagatcgctgtcgaaaaggggaatatcgagctgttcacgcagtagcgtaataaagtgcagactcatatcaaaggccgcaggccaggcggctttcaggttattcatgctgctctggcggtgctcagcaatccacactggtgcggcaaggcaacgtaataaatgcccggtaatattctcaaccagctgcgcatcaataatattcaatgacgcgatgcccggcaccctttgcagcaacccctgcacattatcggctgaaattacctgcgcttgctgatgctgtttctctatcaaacccgtcagggttcttacagcgttatcaccaagaaacagaccgctatgttcaacgatttgttttatctcgtcaccgggatattgcggccactcatcggtcagttgattacgcagggcgtaaatcgccagaatcaggctggagagataatcaccctgcatgagcggccagcggtgttggttgtcgcaggccgtggataaatgctgaaggttgtctcgtgttatgcccgccagcggaattaaaaacggatctttgcgcagcaagttcgccagcaagataacgcgtttctcttctgtctcatcaatgaaatggcccaaaccagggcggctggccaggcaacaagtgcgttcataacgctgttttaaccggggcagacgctctgctacccacgtttctggcaaattaagcgccgaggcgagttgcgcacggggagtgaaagtattcagtaataacagcgccagcagccgatcgtcgttatcgtgcttttgcagcaactgaaaaaagctgcggcgctcgaagatttccagctgatagcccgcactgccactggcgaaaatgcgggctttgccgttaagggtgaagttgagatagtcaatatcacgcaggatggtcctgcctgaaacgccagtctgttgcgccagctcgccaggcgtgcgcggctgttgctccagcagatcgacaatctttaactggcgttcgtttagcattaatccacctgacggaactggctaaacgcgttgactttctccgcagttaaggtcgtcagaaaaccccgtatcagcgtgagcagagcttcgtaatcggcttttgaaatcataccgctgttggcgtgcagataacgagttggcagacacagcgcgacaaccggacgcccgccgcccatcacgttgtagcgcccgccatccgtcgcaccggttttcatggtggaaaattgcagcggtaaatcgttatgtgcggcacagctttttaacgctgctaccagtttctggttggggaagtagcgcttgtcaaacagcatcagccccggcccctggcccagtttcagcgggtatttaatgttatcaatgcccggaacatcgcccgctacggcggtatccaacacgatcacgacgtccggtttaatgtgttccgccgaggtttgcgccccgcgtagcccaacttcttcttccacactgccaacgccatacagcgtaatttcgggattattcaccgtctgcaatagttcagccatcattgcgcagccgatgcggttatccaacgccttgccgaccactttatcttcgccccagcaggcaaaattggcttccgggctaataaaattaccaatttccacgccgcgcttttccacctcttcgcgactgttcgcgccaatatcaatgaacatctcatcaaatgacagcggttgttgcttttgcttttccgttaacgcatgaggcgcgacggaaccaatcacaccagggattttcactcccttgtgtgtgcgtatggttacccggtggttgagcatcgactgattccaccagccgccaatggtggtaaaacgcagaaaaccgctctcgtcgatgtgggtgaccataaagccgacttcatccatatgtccgacaacggcaacttttggacctttattccccttacgggcaacaaagctgcccagaccatcgaaggtgatttcattcacgcaaggttccagcgtgtttatcagaatgtcgcgaacttcctgttcatcgccgctgacggcgctggcttcgcacaactgttgcagtaactcaatgttcatggacaagctcctgttgcgcggctttcgctttgcggcgtaaccacaatcctttcaggacgataatgaatgaaatgttcagcgcgaggccaatcgccagcaccagataaaacgaacccaccggcgacatcaggccgatcagcgggtcaaagatacccaaaccaggtgccagacgtttgattccgaaagcgatcaccagcacgccggtaatgccgcccgccagcgtattggcggtaatcatcggcaacggagctgccagagcgtaaggaatagccggttcggttgcgactgtggcaccgaccacaatggcactactggcagcctctttttcctgtcgggtaaacagtttgggcgcaatgaacgtcgcaagacccgccgcgacgggcggcatcagcgcgacaacgccgacgatggcgtaccagtcataaatgtgtttttccagcagtgagaagcagaagaaccaggcggttttattgatggggccgcccatatcgaacgccagcatcgcaccgaccagaaacgctgccgcaaacttcattgatggaggaatggtattcaggaagtggagcagcccgcccatgaggtcggacatcaccggcccgataacgtagtaagtgagcacgccgaaaaccagcagagtaacgaacgggatcagcattgaaccgagcagcggttgtaatgctttgccaaggcgcactttgcggaaccagaagacgaaatagccaatcgccagccccagcaccaccgcgccgaggaatcccgcacccgactgggtgccgagcagcgctttgtcgttcgccagatagcaaaccagaaacgccggagcgaaagccggtttatcggcaatcgacgaggcaatataagcgcccatgatggggatcataaaggtgaagccaaggtaaccgatggattcaactacccaggtaaacgacggcgcgcctttcgacatatcggtatacggcaaaccgaactgcaccagcatgttggcaagcgccaccaggataccaccgccgatgacaaacggcagcgccgcagagacgcccgccatcaggtggctcatcacgctaccgctttgcacttcctgtttgccaagcttcacgccgctatctgcggcaaaaagctgcgagtttgtcggtaattcgctgaaaatctggtcgatatttttcaacgcctgggagatggcaatctcataaactttcttcccggcaaaccgcgcgcgatcatcaccgctcaggccacgcccggtagcgagaatgacgtaatcggcagcggcaatctcttcgctggataagcggttttcaacgccactggacccttgagtttccacttttatggtatgaccgagagaacgggctttctgttccagggcttccgccaccatgtaggtgtgagcgatcccggcggggcagttggtgatcgcgacaatacgtaaggatgactccatcgccacttccttatgagctgagggtttgatttaacaaggcaagcacctggtcggtatcgccctgttgcagttgatgaataaattccttgtgaataattttgcgacacagtgtgccgatgattttgacctgatcctcttcgccgctttgcggcacgccgaggcagatccagcaattgacgtcttcgccatcgctggctttccagtcaatagcctgcgctttgcgggcgaataatacgaacggttgtttaacgcaggcgcttttaccgtgcggcacggcgacaccggaaccaaatccagtagagtgcattttttcgcgcagcagcagggtttgcaggaactggtgtgagtcggtgataaaaccgttttgtaacgctattgtcgccaactgcttcagaacggaataagcgccattgccctgaatattcaggtcaatacagcttgcagtaagagctgccattaatcggactccataaaatatattttaatcaattgtaatggtggagcgattaagtgatgagaggcgatatgtcggtaaacaatgacaatttgagacagagtgaaaggtcagatttgcggagtaatgcacataatggttatttaaataaaccacatgaatcattaatgggttattcattatttttgtgatttactcacaatgtatcagggaaatataacttaccgggagatgtaatatgtttaatttttcaaatcgaaatttaaaatattgtgccggaggcatctctggcacattgggcaattacggcaggtaaaacacttcttgcagctcgctactcaccgggctgttatccgggttagcgggcataacatcggtcatatatttccaccaacgttggcaaacatcagtgctggcaaccgcattccagcgttcttcagattcaatctctaccatggcaaacagcagattacgcgctttgtcgagatagatggcgtagttatgcgcaccgtgagatttcagcactgcttccagttctggccagatgggattatgccgacgctgatactcttcgtgggcgtcggggtttacctgcatgacaaaggctttgcggatcatgtttgctccttacagcgccagcgcactggcgagtggcgtaacgccgaaacgcttgccgagcgctatcaactcttcacggctgatggtctgtttcatgccgcccatcgaataaaccttcactaatacttgtgctgatttttctgcggtgtcgattaaaccgaaggtttcatccagcgtcggtccgctgccgaagacgccgtggaagggccacaacaccagcgaatgtttttgcatctcttgtgcggtcgcctggccgatttcgtccgtgccgggcaccatccacggcaaaatgccaacgccatccgggaataccaccagacactcggtgctgccttcccacagttggcgagtgaagaccgcggtgtcgttttcaagtacataggtgagggcgatcaggttggtggcgtggcagtgcatgatcacccgatctttgccgttggtggctttaatgcgctcgcagtgggaaaggaagtgagccggaagttcggaagtggggacggcttcgttggttaacccccaaagaatgtggtagcccgcgccgtcgctgtcgacttttacgatgcctaagttagccgcaggatcaagctggacgttacggaagaatttgcccgagccggtgacaataaacggtgtatttgccagtaaaggcatgggctggctgagcgggatatagcgcggttgttggtggaaattgtcgtgatatggtgcgatatcggcgtcatccaggcgtagcgtcaggttgccgccgttgcgctcatcccagcctttcagccaggcgtcggtggtggctttgatcattccctggacaaaccaggactgagtaatgttttgcatgttctgtgttcctgtaaattcggtgttgtcggatgcacgacccgtaggccggataaggcgctcgcgccgcatccggcaatcaatgcctgatgcgacgctgtcgcgtcttatcaggcctacaactattgccgacctgtaggccggataaggcacttgtgccgcatccggcaatcaatgcctgatgcgacgctgtcgcgtcttatcaggcctacaactgttgccgacccgtaggccggataaggcgctcgcgccgcatccggcagtgtttacccgcggcgactcaaaatttctttctcataagcccgcacgctctccagccattcgctacctgctggcgtatcgtgacgttggcaatacatttcccagaccgcctgccacggcaacgatttctgctcttccagcagtgccagacgcgcagtgtaatcgcccgccgcttccagcttgcgcagctcagcggtaggttccagcaacgcacgcagcagggcttttttcatattgcgtgtaccaatgacccacgcggcaatgcggttgatagaggcatcgaagaagtcaaggccgatatgcacccggtcaaacagatcgtgacgcacaatctcactggcaattgcctgggtttcatcatccagcagcactacgtgatcgctgtcccagcgaaccggacggctgacgtgcagcagcaactgcggcacatacagcatggcggcggaaatcttgtcggaaatcacttcagtcgggtggaagtgcccggcgtccaggcacagcgcagtctggcggctggtggcataccccatgtaaaactcattggagccaaccgtgtagctctctgcgccaatgccaaacaatttgctctcaacggcgtcgatatggtgcgcagggtttagcttctcgctgatcacctcatccagtgctgccagcagacgctgacgcggggcgagacggtcaacggtgatatctttcataccatccgggatccagatgttcatcaccgatggtgtgccgagttgctcgccaaaataggccgaaacgcgacggctggctttgcagtgatcaatccagaactggcgaatgctgtcgtcggcatgggaaagcgtaaagccatcggcgcttagcggatgcgaaaagcaggaggggttaaaatccagaccgagctgattggctttcgcccattcaacccagtttttgaagtgctctggtttgatctggtcgcgcgagactggcgtatctgattccagatagatggcatgtaaattaagccgtttcggccccggaatcagccgcatagcctgttccagatcggcacgtagctcactggcattacgcgctttgcccggataattgcctgtggcctgaatccccccggtcagcgaaccttccgggttttcaaaaccggaaacatcatcgccctgccagcagtgcattgaaacgggtaaacgatcaagttggcgcagcgcctcctcgacatcaatccccaccgccgcgaaacgctgtttcgctagctcccaggcctgttccagttgagtggtcatgcgcaaagctcctttgtctgtcgtgtagagtgaatctgcgccacatagtgggcaatttcactgtcaggattaggggtaaaggtggtcagattcgcggtggtgctgacgacctgacggaaatcatccacattgttgagttcatccagcgtcattaactggatgccgatattgccgagcgtcgaggcttcaacaggcccggcgatcacccgaataccgcaggcatcggcgcatagctggttgagcagcgtgttctggcagcctccgccgacaatatgcagttgcgagaaatcttcaccgcgcagctgcgccagctcatgcaacacatcggcatacagcagcgccagactgtcgaaaatgcagcgcgccagttcagcatcactttccgggatcggttgcgccgtttcccgacacgcagcctgaatttcgctgcacatcgtctcaggattaataaagcgatcgtcattgggattgataatgaagcggcaagccggaagtgcctgtgtcgcggagataagcgccggaagatcgttgatttgctgctcctgaagcactcgctgaagcagccataagcccataatatttttcagcacccgatagcgaccttccgccccgccttcattggtgatgttggctgccagtgccgtgtcattggtaaatggcgtctggctttcgaagcccatcaatgaccaggtgccagaagagagataagcagcacgtgagccgtttaacggcgaggcgataaccgcgctggcggtatcatggctggcaacggcgaccactggaatctcattaccctgcgggcaaatccagtgacctatgacattacccggatgcgtcgggcgaccaaaccaggctttgttggccccgctccacgccagtagcgactcgtcccagtcgtcgctattgatattgaccagttgcgtggtcgtggcgttggtatattcccagttcatcttgccggtcaggcgataactgaagtaatccggcatcagcagagcgtgagcaatgtgtggaataagttcaggttgttgctccgtcagcgcacgcaactgataaagcgtattgaagggcagaaactggatgccgctacgttgataaatatcgcgtttgccgagttgttgttgtgcctgcgccattaggccattggtgcggctatcgcgataagcaacgggcaggcccacacgctgaccctgttggtcgagcagcacaaagtccacgccccaggtatcaatcccaatgctatcgatacgaatcccttcctcgcacaccttgtttaatccaaggcgaatggcactttcaaggctatccacatccctggtgacatagccgttctgactatgcagcccattgttaaaacgatggatttcgcgcagcgtcaggctgcggcattcacgctcgtaacgcgccagcatcacgcgcccactggatgcgccgagatcgacggcgacacaattgcgaaaggtcataatgtgatcctgctgaatttcattacgaccagtctaaaaagcgcctgaattcgcgaccttctcgttactgacaggaaaatgggccattggcaaccagggaaagatgaacgtgatgatgttcacaatttgctgaattgtggtgatgtgatgctcaccgcatttcctgaaaattcacgctgtatcttgaaaaatcgacgttttttacgtggttttccgtcgaaaatttaaggtaagaacctgacctcgtgattactatttcgccgtgttgacgacatcaggaggccagtatgaccgtattacatagtgtggatttttttccgtctggtaacgcgtccgtggcgatagaaccccggctcccgcaggcggattttcctgaacatcatcatgattttcatgaaattgtgattgtcgaacatggcacgggtattcatgtgtttaatgggcagccctataccatcaccggtggcacggtctgtttcgtacgcgatcatgatcggcatctgtatgaacataccgataatctgtgtctgaccaatgtgctgtatcgctcgccggatcgatttcagtttctcgccgggctgaatcagttgctgccacaagagctggatgggcagtatccgtctcactggcgcgttaaccacagcgtattgcagcaggtgcgacagctggttgcacagatggaacagcaggaaggggaaaatgatttaccctcgaccgccagtcgcgagatcttgtttatgcaattactgctcttgctgtgtaaaagcagtttgcaggagaacctggaaaacagcgcatcacgtctcaacttgcttctggcctggctggaggaccattttgccgatgaggtgaattgggatgccgtggcggatcaattttctctttcactgcgtacgctacatcggcagcttaagcagcaaacgggactgacgcctcagcgatacctgaaccgcctgcgactgatgaaagcccgacatctgctacgccacagcgaggccagcgttactgacatcgcctatcgctgtggattcagcgacagtaaccacttttcgacgctttttcgccgagagtttaactggtcaccgcgtgatattcgccagggacgggatggctttctgcaataacgcgaatcttctcaacgtatttgtacgccatattgcgaataatcaacttcgttctctggccgaggtagccacggtggcgcatcagttaaaacttctcaaagatgatttttttgccagcgaccagcaggcagtcgctgtggctgaccgttatccgcaagatgtctttgctgaacatacacatgatttttgtgagctggtgattgtctggcgcggtaatggcctgcatgtactcaacgatcgcccttatcgcattacccgtggcgatctcttttacattcatgctgacgataaacactcctacgcttccgttaacgatctggttttgcagaatattatttattgcccggagcgtctgaagctgaatcttgactggcagggggcgattccgggatttaacgccagcgcagggcaaccacactggcgcttaggtagcatggggatggcgcaggcgcggcaggttatcggtcagcttgagcatgaaagtagtcagcatgtgccgtttgctaacgaaatggctgagttgctgttcgggcagttggtgatgttgctgaatcgccatcgttacaccagtgattcgttgccgccaacatccagcgaaacgttgctggataagctgattacccggctggcggctagcctgaaaagtccctttgcgctggataaattttgtgatgaggcatcgtgcagtgagcgcgttttgcgtcagcaatttcgccagcagactggaatgaccatcaatcaatatctgcgacaggtcagagtgtgtcatgcgcaatatcttctccagcatagccgcctgttaatcagtgatatttcgaccgaatgtggctttgaagatagtaactatttttcggtggtgtttacccgggaaaccgggatgacgcccagccagtggcgtcatctcaattcgcagaaagattaattcgccatgccgatgccgacgatgttagcggcgacaataatcaccacacaaccgaggctcaacaccgttaccggacggcgtcctgcattgttccactctttcagcaccagcccgacgataccgccgcacaatacatagaaactcatatgcagcatccaactgatgtagtcatactgcgccggaatgcgggcgtggccccaggcatagaaaaagaattgcagataccacatcaacccgcccagtgtcgagagtaacacattgtgaatgatcagcgattttgccagcgagaagtcggcttttagcgacaaatccttcacttttgccagacgaataaaacagaaaccgaggttaatgatcgcgccgccgcccatgatgacaacatagcttggcagagcgacatacagtggatcgacgccaagtgcggcagcggcttcatgcatcggttttgcggcgttcatcgcaaaggacatcccggcagagaaaatgccgcacatcaccgccagcaccagcccttttttcagattgaactcttcggctttaatgcccatcttgcgctctttcaactgcccggcgcgagttacaatccctacgccaatcagcgccaccagaacgccgagcaacgtcatgcgtccgccttcggtgctaatcaacacatcgaaattgccgttgataattggcgtcatcagcgtaccgacaatcaacgtaatgccaatggcgatgccaattcccatcgacatgccaagataacgcatggtcaggccgtagttgatattaccgatcccccacatagcgccgaacagaaaaacaggcagtagcgtagagagactaaacgagctgtaatacgcccagaaattcggtagtaacagggcgctgatggcccacggcagaataatccacgaaacaatcccaccgactgaccacatggtttcccatgaccattttttacttttttgaacggagcgtaaaaacaggctgcactggccgcgccgatcaaatgccaaaatatccccatcgtaatcgcgttactcatcttcttatcctcatcatttttcgtcgcgtcacatctccgacgagatgagtgtaaaaatcgtgctgtcgattaacctttcgcctgttgccgccgttgtcgatttactggcaatcacggcattaagtgggtgatttgcttcacatctcgggcattttcctgcaaaaccatacccttacgaaaagtacggcattgataatcattttcaatatcatttaattaactataatgaaccaactgcttacgcggcattaacaatcggccgcccgacaatactggagatgaatatgagctataccctgccatccctgccgtatgcttacgatgccctggaaccgcacttcgataagcagaccatggaaatccaccacaccaaacaccatcagacctacgtaaacaacgccaacgcggcgctggaaagcctgccagaatttgccaacctgccggttgaagagctgatcaccaaactggaccagctgccagcagacaagaaaaccgtactgcgcaacaacgctggcggtcacgctaaccacagcctgttctggaaaggtctgaaaaaaggcaccaccctgcagggtgacctgaaagcggctatcgaacgtgacttcggctccgttgataacttcaaagcagaatttgaaaaagcggcagcttcccgctttggttccggctgggcatggctggtgctgaaaggcgataaactggcggtggtttctactgctaaccaggattctccgctgatgggtgaagctatttctggcgcttccggcttcccgattatgggcctggatgtgtgggaacatgcttactacctgaaattccagaaccgccgtccggactacattaaagagttctggaacgtggtgaactgggacgaagcagcggcacgttttgcggcgaaaaaataatcatttgccgcctgctgcaatgaggcgtataggccgcatatcagcttaaaaaatgaaccatcgccaacggcggtggtttttttgtgatcaatttcaaaataaaaacaatgatccgataaaaataaaacagcgtttcaattgatgtggttttgatcacttttattgattaaatgaatgtctatcttcgtttccatcaacactgatgctccattgaggaattacgcatcagcccttaaaaatatgccgacaggtgatggaaatgcagataaaacgctcgattgagaaaatcccgggggggatgatgctcgtcccgctattccttggcgcactgtgccacaccttctcgccgggggcggggaaatattttggatcattcaccaacgggatgattaccggtacggtgcccattctggcggtgtggtttttttgcatgggggcgtcaataaaattaagcgcgacgggaacggtactgcgtaaatccggtacgctggtggtaactaaaattgccgtcgcgtgggtggttgcggcaattgcctcgcgtattattccggaacatggtgttgaagttggattctttgccggactttcaacgctggcgctggtggcggcgatggatatgaccaatggcggactttacgcttccatcatgcagcagtacggcacaaaagaagaagctggggcatttgtgttgatgtcgttggagtccgggccgctcatgacgatgattattctgggcactgccgggattgcctcgtttgaaccgcatgttttcgtcggcgcagtattaccgttcctggtgggctttgccctggggaaccttgaccctgaattgcgagaatttttcagcaaagcggtgcaaacgctgattccattctttgccttcgcgctgggcaataccattgatttgactgtgattgcccagactggtttgctggggatcctgttgggtgtggcagtaattatcgtgaccggtattccgttgattatcgccgataaattgattggcggtggcgatggcactgccggaattgccgcttccagttccgcaggggccgcggtagcgacacctgtgctgattgcagaaatggtgcctgcgtttaaaccgatggctccggcagcaacttcgctggtagcgacggcggtcattgtgacttcgattctggtgccaattcttacctctatctggtcacgtaaagtcaaagccagagcagcgaaaatcgaaattttaggtacggtgaaataaacctgcttccttaatccccacagccggatgaactaacgttcgtccggtttgctattgagttcctgcctggatacttaccgcgaaaacagcacgcctgacataaaataaatatggtctaatggggaaatttctcgtggagagggaacagatgcgatatccggttgatgtatacacaggcaagattcaggcttatcccgaaggcaaacccagcgcaattgctaaaatccaggttgatggtgagttgatgctgacggagctggggctggaaggtgacgagcaggcggagaaaaaggttcacggcgggccagacagagcgctgtgtcattatcctcgtgagcattatctctactgggcgcgggaatttccggaacaggcggagttgtttgttgcgcctgcgtttggtgaaaacctctcaaccgacggcctgacggaaagtaatgtttatatgggcgatattttccgctggggagaggcattaattcaggtcagccagccgcgctcgccttgctataaactcaattaccattttgatatcagcgatatagcgcagttgatgcaaaacacaggtaaggtggggtggttgtatagcgtgatagcgccagggaaagtgtctgcggacgcgccgctggagttggtttcccgtgtcagcgatgtgaccgtgcaggaggctgccgccatcgcatggcatatgccgtttgatgacgatcaatatcaccgtttactctccgctgccgggttatcgaaaagctggacgcggacgatgcaaaagcgccgactgagcggcaagatcgaagatttttcccgccggttgtggggaaaataacccccggagtgtaggcctgataagacgctatcagcgtcgcatcaggcatcctgctcaaatgccggatgcggcgtaaacgccttatcctgcctgcaaatgcgaagtttaactccgcttatacagcggcaaccaaatcaccagccgtaaaccgcccagcgggctgtcttctgccttcacccagccacgatgctgctgaatggcggtttcaacaatcgccagccccaaacctgtaccgccagattcacgatcgcgtgcttcatcggtacgatagaacggacggaaaatctgttcgcgatcttccgggctaacgccaggaccatcgtcgtccaccgtaatggtgataccgtctttatctaccgcaaagcccacttcaatcttcgtatgggaataacgcagagcattacgaacaatgttttccagcgcactttccagggcgttcggattgccgtacagcggccacggcccaggcgggaagttaactgtcaacgacttgcccatttgctcggcttcgaacgccgcgttatccagcacttcactccacaactggttggctttgatggtttcgctaaccagcgcgtttttttgctgattacgtgacatcaccaacagatcgttgatcatgctgtccagacgttgcgcttcggtttcaatacgctccagttccttgctttcaccgctacgacggcgcagtaacgccgtacccagttgcagacgcgtcagcggggtgcgcagctcgtgagagatatcagaaagcagacgctgctgagaggtcatcatgcgctccagcgcggtgaccatctggttaaaactggcacctgcggcaaggaattcctgtggccccgcttccagttccgggtgctggcgtaagtttccctgggcaacttcatcggcagcgtttttcagcttacgcgccggttttgccagactccaggccaaccacaacagcagcggcgtactgaccaacatggtgacaatcagcagtaatagcgggcggtcaaacagtaagttaatgaaatcggattgagaactgctggccggacgaatcagataaagttggtaattatcttcgccatcacgcacggagaacggaccgaccagttccacgcggccatactttttcttctgcggatgatcggcgttatcggcctgaccaataaagttacgaatgatctgcatttcgctgcgttcagcgccgatcacgcggccttcggtggtcaccaataacaaacgctgtcctggcggtgcccacttatcaatcgcccggaacagacgccgccaccacattaaatcgttgggcggatcgttcgccagctccgcttcgacatgctgctcaatcatcagcccctgacgctgttcgctatccagaagctcggtcatctggcgtgaatcgagcttgggtaacatcaaaaccaacatcaacaccagcgccagcgtcagccagaagatggcgaagatgcgcgcggttaagctgcctatcatgaagcagaaaccatcagatagccgcgaccacgcaaggttttaaaccacgggtgaccatctttacgatccggcagtttacgacgcaggttggaaatgtgcatatcaatagcgcggtcgaaaggcgtcaggcgtttgcccaacacttcctggcttaaatgttcacgggaaaccacctgacccagatgctgtgccagcaaatagagcagggtaaactcagtaccggttaactccagcgtttgcccgtcgaagctggcttcctgacggcctggattcagcactaaggcatcaacttccagtgtcggtgaaccgttgtcgttgttttgctgttgctcgctccagtgcgaacggcgcaggatcgcgcgaatacgtgccaccagctcacgatcattaaacggtttcgggagatagtcatctgcgcccagctcaaggccgagaacgcgatcaagttcactgccgcgcgccgtcaacataatgacaggcgtctggtgtgtctggcgaagtgcttttaatgtgtcgataccatttttcttcggcatcattacgtcaagcaaaagtaaatcaatgctgtcgtccagaagatcaagcgcctgttccccatcgtgggcaacaatcacgttgaagccttccatctcgagcagctcctttaatagggaagtcagctctcggtcatcatcaactaacaggattttattcattgtttaaatacctccgaggcagaaattacgtcatcagacgtcgctaatccatgactttacgttgttttacaccccctgacgcatgtttgcagcctgaatcgtaaactctctatcgttgaatcgcgacagaaagattttgggagcaaatgatgcgcatagttaccgctgccgtcatggcctcaacgctggcagtcagttcattaagccacgctgctgaagtcggttcaggcgataactggcatccgggtgaagaacttacgcagcgcagtacgcagagccatatgttcgacggcataagtttaaccgaacatcagcgtcagcagatgcgagatcttatgcaacaggcccggcacgaacagcctcctgttaatgttagcgaactggagacaatgcatcgccttgtcaccgcagaaaattttgatgaaaacgctgtgcgcgcacaggcagaaaaaatggcgaatgagcaaattgctcgtcaggttgagatggcaaaagtccgcaaccaaatgtatcgcctgttaacgccggagcagcaagcggttttaaacgagaaacatcaacaacgaatggagcagttgcgtgacgtgacgcaatggcaaaaaagttcatcgttgaagctattgagtagtagcaactcacgttcccagtagtaaaccctgttttccttgccatagacaccatccctgtcttcccccacatgctgtgggggttttttttatcctcaatttgcctgctgcttaatgcattgcagatgatttgcttccgttatactagcgtcagttgatagcgggagtatttatgaatcaatcttatggacggctggtcagtcgggcggcgattgctgcgacggcgatggcttcgctgctattgctgattaaaatttttgcatggtggtataccgggtcggtgagtattctcgccgcgctggtggattcgctggtggatatcggcgcgtcgttgacgaatttattggtggtgcgatattccctgcaacctgccgacgataatcactcgtttggtcacggtaaagctgagtccctcgcggcgctggcgcaaagtatgtttatctccggttcggcactattcctgtttttgacgggtattcaacatctgatatctccaacaccgatgacagatccaggcgtcggggttatcgtgacaattgtggcgctaatttgtacgattatccttgtctcgtttcagcgttgggtggtgcggcggacgcaaagccaggcggtgcgggctgatatgctacattaccagtctgatgttatgatgaacggcgcaattctgctggcgctggggttgtcctggtacggctggcatcgcgccgatgctctgtttgcattgggaatcggcatctatattttatatagcgcgttacgcatgggatatgaggcggtacagtcattactggatcgcgcattgcctgatgaggaacggcaagaaattattgatatcgtgacttcctggccgggtgttagcggcgctcacgatcttcgcacgcggcagtcagggccgacccgctttattcagattcatttggaaatggaagactctctgcctttggttcaggcacatatggtggcggatcaggtagagcaggctattttacggcgttttccgggatcggatgtaattatccatcaggacccctgttccgtcgtacccaaggagggtaaacggtctatgctttcataatcagtataaaagagagccagacccgcattttgtgtataaaataccgccatttggcctgacctgaatcaattcagcaggaagtgattgttatactatttgcacattcgttggatcacttcgatgtgcaagaagacttccggcaacagatttcattttgcattccaaagttcagaggtagtcatgattaagaaaatcggtgtgttgacaagcggcggtgatgcgccaggcatgaacgccgcaattcgcggggttgttcgttctgcgctgacagaaggtctggaagtaatgggtatttatgacggctatctgggtctgtatgaagaccgtatggtacagctagaccgttacagcgtgtctgacatgatcaaccgtggcggtacgttcctcggttctgcgcgtttcccggaattccgcgacgagaacatccgcgccgtggctatcgaaaacctgaaaaaacgtggtatcgacgcgctggtggttatcggcggtgacggttcctacatgggtgcaatgcgtctgaccgaaatgggcttcccgtgcatcggtctgccgggcactatcgacaacgacatcaaaggcactgactacactatcggtttcttcactgcgctgagcaccgttgtagaagcgatcgaccgtctgcgtgacacctcttcttctcaccagcgtatttccgtggtggaagtgatgggccgttattgtggagatctgacgttggctgcggccattgccggtggctgtgaattcgttgtggttccggaagttgaattcagccgtgaagacctggtaaacgaaatcaaagcgggtatcgcgaaaggtaaaaaacacgcgatcgtggcgattaccgaacatatgtgtgatgttgacgaactggcgcatttcatcgagaaagaaaccggtcgtgaaacccgcgcaactgtgctgggccacatccagcgcggtggttctccggtgccttacgaccgtattctggcttcccgtatgggcgcttacgctatcgatctgctgctggcaggttacggcggtcgttgtgtaggtatccagaacgaacagctggttcaccacgacatcatcgacgctatcgaaaacatgaagcgtccgttcaaaggtgactggctggactgcgcgaaaaaactgtattaatgatttcggaaaaaggcagattcctttaccctgaaaccgatgacagaagcaaaaatgcctgatgcgcttcgcttatcaggcctacatgaattctgcaatttattgaatttgcaaacttttgtaggccggataaggcgttcgcgccgcatccggcatggacaaagcgcactttgtcagcaatatgaggcggatttcttccgcctttttaatccctcaacatatacccgcaagttatagccaatctttttttattctttaatgtttggttaaccttctggcacgctttgctcatcacaacacaacataagagagtcgggcgatgaacaagtggggcgtagggttaacatttttgctggcggcaaccagcgttatggcaaaggatattcagcttcttaacgtttcatatgatccaacgcgcgaattgtacgaacagtacaacaaggcattcagcgcccactggaaacagcaaactggtgataacgtggtgattcgtcagtcacacggtggctcaggtaaacaagcgacgtcggtaatcaacggtattgaagctgatgttgtcacgctggctctggcctatgacgtggacgcaattgcggaacgcgggcggattgataaagagtggatcaaacgtctgccggataactccgcaccgtacacttccaccattgttttcctggtacgtaagggaaatccgaagcagatccatgactggaacgatctgattaaaccgggtgtttcggtgatcacgcctaatccgaaaagctctggtggcgcgcgctggaactacctggcagcctggggctacgcgctgcatcacaacaacaacgatcaggcaaaagcacaggattttgttcgggcactgtataaaaacgtcgaagttctggattctggcgcgcgtggctccactaacacttttgtcgagcgcggaattggcgatgtactgattgcctgggaaaacgaagctctgctggcagcgaatgaactggggaaagataaattcgaaatcgtcacgccgagtgagtctatcctcgcagagccaaccgtgtcggtggtcgataaagtggtcgagaaaaaaggtactaaagaggtggcggaagcctacctgaaatatctctactcgccagaaggtcaggaaattgccgcgaaaaactactaccgtccgcgcgacgctgaggtggcgaaaaagtacgaaaatgcgtttccaaagctgaagttattcaccattgatgaagagttcggcggctggacgaaagcgcaaaaagagcattttgctaacggcggtacgttcgatcagatcagcaaacgctgatttccccaggataattatcaaacccggtggtttctcgcgaccgggttttttatttgtcacgattttgcgttacccttgcatctctttgaggtacagggaaaaaaagatgaaaaaagcgggtcttctttttttggtgatgatagttatcgccgttgtggctgccggtattggttactggaaattaaccggtgaagagtcggatacattacgtaagattgtccttgaggaatgtttgcccaatcagcagcaaaatcaaaatccttcgccatgtgcggaagtcaaacccaatgccggatacgtggttttaaaagatcttaatggcccactgcaatatctgttgatgccaacgtatcgtattaacggtactgaaagtcctttgttgaccgatccttcaacgccgaacttcttttggttggcttggcaggcgcgtgattttatgagcaaaaaatacggccagccggttcccgatcgcgcggtttctttggcgatcaactcccgcaccgggcgtacgcaaaaccattttcatattcatatctcttgtattcgtcctgatgtgcgcaaacagctggataacaatctggcgaacatcagcagccgctggttgccactgccaggtggtttgcgcgggcatgaatacctggcgcgtcgggtaacggaaagcgaactggtacaacgcagcccatttatgatgctggcagaagaagtacctgaggcgcgggaacatatgggacgctacgggctggcgatggtacggcagagtgataactcatttgtattgctggcgacacaacgaaatctactgacgcttaaccgtgcttcagccgaggaaattcaggatcatcagtgtgagattttgcgttaaggcgaagagttaaggaaagtaagtgccggatatgaaatccggcacctgtcagacttaagcctgtttagccgcttctgcagctttaacgattactgcgaaggcgtcagctttcagagaagcaccaccaaccagcgcgccgtcgatatccggctgagcaaacagttctgcagcgttagacgcgtttacagagccgccgtactgaatgatcacttgttcagcgatgttagcgtcaactttagcgatgtggtcacggatgaatttgtgaacagcctgtgcctgagccggagttgcagatttgccagtaccgattgcccatacaggttcgtaagcgataaccgcaccttcgaatgccgcagcaccctgagttttcagtaccgcgtcgatctgacgtgcgcaaacttcttcagttttgcccgcttcattttcagcttcggtttcaccgatgcacagaaccggagtcaggccctgctctttcagcaccgcgaattttttcgcgatcagttcgtcagattctttgtggtaagtacgacgttcagagtgaccgatgatgatgtactgtgcgccgatgtctttcagcatagcagcagaggtttcaccggtgaatgcgccggacaggttcaggtccacgttttgcgcacccagcatgatgtggctgccttcagcttcgcgcttcgccatatcgatatacatttccggtggtgcgattgcaaccgcacagccagcaacacctgccagctctttacgcaggttagaaaccagctcgtgaaccatgtggcggctgccgttcagtttccagttacccatcactaaaggatgtcgcattttaattctccacgcttataagcgaataaaggaagatggccgccccgcagggcagcaggtctgtgaaacagtatagagattcatcggcacaaaggctttgctttttgtcatttattcaaaccttcaagcgattcagatagcgccagcttaatcggttcaacagcgaaggtcagccccttttcgccgttgtccgcgacaacataacgcagtgcaccttctgtctcggtgtaataacgtttgtttttccccgccgttagtagcgactgcagttttttctggctttgtgttttggtcattaatggggtgagtgtgcggatcaccgctgccatgtattcctgagctttcgctttcgcggctttttgctctggcccctggatgggtagccaggtcatttgaatgcttttgatttttaaggtaccgcgctccagcgctgtagaagcatacaagttctcattaattttacttgcagcacgagtgagattggctttgtcgggactgctgtcgatggcacgaaattcgttcagtggcaggctgggattctggctgttaaagtcttctcgaaactggctgatggagagatcgaaagtaggggctccagccagcagataaggcgcggtcgttgccgtatctggtgtttgtgcatgcgccgctgttgtaacggttaatgcagaacataagagaaaaaacagcgtacaccctggcttcattgacagtaccttttgttatgactggctccgattaaaacgatatctgtcgcccttgtcaaaagggtagaatcctggaaaagacaaccatcaaggaacttacatgaccatacagcaatggttattctcatttaaagggcgtattggacgccgtgatttctggatttggataggcctgtggttcgcaggcatgctggtgcttttctcactggcgggtaagaatctactcgatattcagaccgcggcgttttgccttgtgtgcttgctctggccaacagcggcagtaactgttaagcgcttgcatgatcgcgggcgttccggcgcatgggcatttctgatgattgtggcgtggatgctgctggcgggtaactgggcgattttaccgggtgtctggcaatgggcggtggggcgttttgtcccgacgttgattctggtgatgatgcttatcgatcttggtgcgtttgttggcacacaaggcgaaaataaatatggtaaagatactcaggatgtgaagtataaagccgacaataaatcaagtaattaacctttaatatatctcttactgctatttttttccgggattgttatttccacgatgcaaatgacaatacccggaaaatccttctgaactcttcaccttaagcaatatcaaaaaaaatggtaatccataagatcattacttgtttgttcttcccttaacggcgcattattcttaagtcgtaatcgacagagaggcgaatatacagaggtgccctatgaaagatgtcgtagataaatgcagtactaaaggatgtgcgattgatatcggtacggtgattgataacgacaactgtaccagtaagttttcgcgcttttttgccacccgcgaagaagcagagtcttttatgaccaaactgaaagagcttgccgccgctacatcctctgcagatgaaggggccagcgtggcctataagattaaggatctggaggggcaagttgagcttgatgcggccttcactttctcatgccaggccgagatgattatttttgagttatcactgcgttcgttagcttgatggagttgctttagaaggagttaaacatggcttataaacacattggcgtggcaatttccgggaatgaagaagatgccttactggtgaataaagccctggagctcgccagacataatgacgctcacctgacgttaattcatattgatgatggcttaagcgagttgtatccgggtatctacttccctgcaacagaagatattcttcaattgttgaagaataagtcggataacaagctgtataaactgacgaaaaatattcaatggccgaagacaaaactgcgtattgaacgcggagaaatgccggaaacactgctggaaattatgcaaaaagagcagtgcgacctccttgtctgtggtcatcatcactcatttatcaaccgtttgatgccggcatatcgcgggatgatcaataagatgagtgcggatttgctcatcgtgccgtttatcgataagtaaccgcttaccagtaatgctccgctgtcatatggcccggtcggcgacgtaaatgtttcgtcatctgccgggtctctttcagcaactgttgtgtatcgcgcaccatctgtggattgccgcacagcatcacatggctggtttctttattcatcggcaggccaatcgtgctttccagttccccactttcaattaatgccggtatccgtccggtgagcgaccccgctgccgtttcccgactgaccaccgtctgaatgcgcagttttccttcgtagcgtttttccagttcctgcatcagtggcaaatagcttaagtcggcggcataacgtgcggcgtgcaccaggaccagatttttgaagcgatctaaatctttacctagttgcagaatcgataaataagggccaatcgctgtaccggttgccagcatccatagcgtttcgcagtgcggcacttcatcgagcacaaagaatcctgccgcttcgctaaccacctgcacttcatcgcctggtttcagtgccgccagtcgtgggcttaatttgccatcggggacggtgaccaggtaaaactccagatcgggattatcgggcgagtttacataggagtaggcgcgctggacgcgttcgccgtcgatttcaaggccaagcttggtaaattgcccggcggtaaacggaagcacgggggcgtgaacggtgagactaaacagggcgtcggtccagttctgcactttagtgactttgcctgttacccaatcagccatgtttttctcctgttttgattgacttgccttatcttcgttctccgaacaaaaaaattccagtcccgaaggactggaaggctcaatcgatcaaatcaatcagaggatgtgcacctgcatttccgggtctttgcgatccagatagtggatggactgaatgcggcgaatggtgcgtgacttgccgcggatcagcagcgtttcggtagtcgcgatattgcctttgcggctaatgccttccagcagatcgcctttggtaataccggtggcagagaagatgacgttatcgctgcgcgccatatcgcccaggcgcaatactttaccggcttcgatgcccatcgctttgcagcgtgccagctcctgctcgccaatgcgacgattctcttcgttgtcgcctttgacgtcatgacgcgccagcagacgaccgttcatgtcgccatctaatgcgcggatcaccgccgcagaaactacgccttccggcgcgccaccaataccgtacagcacgtcaacttcgctgtctggcatacaggtgagaattgaggccgcaacgtcgccgtccggaatagcaaatacgcgtacgccgagttgctgcatttcagcgataacggcatcgtggcgtggtttagccagaatcgttaccgtcagttcgctcaacggtttgccgagcgccgccgctacattgcgcaggttatccgccagcggcaggttcagatcaatggtgcctttggctcccggcccgacaatcagcttctccatatacatatccggcgcattgaggaagcagcctttatcgcctactgccagcaccgccagcgcgttagcctggcccatcgccgtcatgcgcgtgccttcaatcggatcaacagcaatatctaccgcgtcgccgcgaccagtaccgactttttcaccaatgtagagcatcggtgcttcgtcgatttcaccttcaccaatgacgatggtgccgtcaatgttgacctggttgagcataatacgcatggcgtttaccgccgcgccgtccgcggtgtttttatcgccgcgtcctaaccatttgtagccagccagcgccgctgattcggtgacgcgggaaaattcgatggcaagttctcgtctcatagcaaactctaagcagtaaggaatggcgcgaagtgtagcacaggggaagggagggattattgatgtgtgcggggttgcccccgcacgtttcgggactaccggatgcggcataaacgcttcattcggcatttacattattcgtcgtgttcttcccacgccatcgcgcgtttaaccgcttttttccagcctgcgtaacggtaattacgctcagtggtttcgatgcctggacggaactcgcgctcaatcaccgctttctcttgcagctcgtcgaggttctgccagaagccaaccgccaggcctgcgagataggccgcacccaatgcggtgacttcgcgcacttccgggcgctcaacgcgggtgccgagaatatcggactggaactgcatcaggaaattgtttgctactgcgccaccatccacgcgcagggcgtgcagacggataccagagtcggcctgcatcgcttccagcacgtcacgcgtctgataagcaatagactccagcgtcgcgcgtataatgtggttagcgttcaccccacgagtcagaccgaaaatcgccccgcgcgcatacgggtcccagtacggcgcacccagcccggtaaatgccggaaccacatacacaccattggtgttttgcactttggtggcgaaatattcggaatcgtaggcgtcgttaatcaacttcatttcatcgcgcagccactgaatggatgcgcctgccataaacaccgcaccttccaacgcatagttcacttcgccagtcgggccgcaggcgatggtggtcagcaggccgttttctgatttcaccgctttctcgccagtgttcatcagcataaagcagccagtgccataggtgttcttcgccatcccttctttcacgcacaactgaccaaacagcgcggcctgctggtcaccggcgatcccggagattggaatacgcgtgccgcctttgccgccaatgttagtctgaccgtatacttcggaagaacgacgcacttctggcagcatctcgcgcggaatatccagcacttccagcattttgtcgtcccagtccagggtatggatgttgaacaacatggtacgagaggcgttggtgtaatcggtcacatggacacggccctgagtcattttccagataagccacgtatcaaccgtaccaaacagcaattcaccacgacgtgcacgctcgcgagagccttccacatggtcgaggatccacttcactttggtgccagaaaagtacgggtcaatcaccagaccggtattgctgcggatataatcttctaaaccgtcacgttttaaatgctcgcagatttctgcggtacgacggcactgccagacaatggcgttatagataggcttgccggtttctttttcccagacaatagtggtttcacgctggttcgtaataccgatagctgcaatttgatcggaactgatatcggctttcgccagcacttctaccagcgtggagctttgggtggcccagatttccattgggtcgtgttctacccaacctggttttgggtagatttgctcaaattcgcgctgcgacacgctaatgatattggcatcgtgatccattacgaccgcgcgggagctggtggtgccctggtcgagcgcaacgatatattttttttcagtcatgtttaattgtcccgtagtcatattacagcgaagctttttgttctgaaggagttgtggtttccttttcttccacaacacagatatcgcaaggcaaatggcgaccaatcagtttgcggtaggcaaatgcacctacaatcgcgccaacgatagggccgaaaagcggcaccaggaagtaaggaatgtctctgccgccggtaaaggcgacattgccccagcccgccagccaggcaaagactttcggaccgaagtcacgcgctgggttcatggcaaaacctgtcaatgggcccatagatgcgccaatgaccgcaatcagtagaccaatcagcaagggagccaaagggccgcgtggtacaccgttgccatcgtccgttaacgccaggatcagccccatcagaatagcggtaatcaccatctcaactgcgaaagcctgcacaaaattgatatgaggattagggtaagtagagaaagtgccagccagatcaacactttcaacgctgccgcgaacaatgtgatgagtctgctcgaagtcgaaaaataaattgtagtaaagcccgtaaactaaagccgcagcacagaaagcgccggcaacttgtgaaacgataaaaggaataactttgcgcttgtcgaaacaggcaaacagccacaatgcaatggtaacagcgggattaagatgcgcgccggaaacccctgcggtcaggtagatggccattgccacccccagtccccaaatgacactgatttcccactgaccaaaagacgcaccagcgacttttagtgctgcaacgcaacccacaccgaagaaaatcaacaacccggtaccgaggaattcagcaatgcactggcctttcaaggttgatgtttgactcataatcggatcctgaagagttaatgtttgttgtatgcgtgaaagtcacggacctccacgatgcttgtaggcatgctgtaaacttatcgttaacgagcaaaaacgagaaatatcgaacttaaaatgtgtgtgcctcgtcataaaatgagcgttatcgcgccatttattccatctgattgtacatgatgcatgtttgttagatcattcgcgcaacaaatttattaacattttcgattgatgtggattatgtcaccaggagaaggatgaaaagtgtggcaaaccgtaatctgcaaggcgtgccgctggacagcgatggcgcggcttcatacaatcggagctaactaaagtgcgctcgtatttattaaggcgtcaccggtaatcgggacgaggatttttatccatcaacgccttgcaattcaggagaggtatgacaatgtcattagaagtgtttgagaaactggaagcaaaagtacagcaggcgattgataccatcactctgttgcagatggaaatcgaagagctgaaagaaaaaaacaactcactgtcgcaggaagttcaaaatgcccagcatcagcgcgaagagctggagcgtgagaacaaccatctgaaagaacagcagaacggctggcaggaacgtctgcaggccctgctgggtcgcatggaagaggtctgattacgcttcatcttccgcgtaatttctttactgtgtaggccaacaggtaacgcagaaaaaaggcaccttgcggtgcctttcttatcattcaatatccagcggatcttctgaaagaataatcccggtattgtcggcataaagatggtcgccggagaagaaggtgacaccgccaaaattgatgcggacatcgctttcgccaatgccttcgccagcggcaccaaccggaattgccgccatcgcctggatgccgatatccaactcttccaggtcatctacctgacgcaccgcgccgtaaatgaccagaccttcccattcattttgtactgccagacgcgccagttcagcatcgaccagtgcgcgacgaacagaaccaccgccatcgacgacaagaacacgaccacggccattctgttcgagcagatcgtacagcaacccgttgtcctcgaaacattttaccgtgattatttgtccgccaaacgacgcccgtccgccaaagttggagaacagcggttccacgacgttaacatcttcttgatagatgtcacaaagctcggaagtatcgtatttcataggcttaacattcagttgctgcgagaattttcagtatatcgcgctatgtgggctgttggcaaaatcatcaattgttaattgatatttgtcagttatgctgcccactggcttaggaatatccctaaaacaaacagcaggttagtcagtaacgctcccttgacagtacgttccagcattggtcgcatcgccaccgggtccatttcccgcatcacataacgggcttgcttcaccagtaatggtgccgccagcaggaacagccagccccacaggctatgcagcgaaaagagattaaacagcgccagacacaccagcgagcccatcagcaggcaggcatgataacgacgcgcgttcacttcacctaagcgcaccaccagcgtgtttttgccattttcgcggtcgctattgatatcacgcaggttattaatattcagtactgccgttgccagcaggccgcatgcggtcgccggaaggatcagtgccggaatcaatgtatgagcctgtaaataccagctccccatgacactcaaccagccaaagaaaaccagtacggaaatatcacccagaccgatataaccataaggacgattgcccacggtgtaggtgatagcggcaatgatcgacaacccgccaagaatcaggaaaccgacaaaatcggccagcgtatggcatgccactgcaaccagtgccagcccggagagacagatgagcacgacggtaataatgagcgcccgtttcatctcttgctgggtaatgacccctttttgcatgccgcgtagcggcccaatgcggtcaggtttatcgctgccttttaccgcatcgccgtaatcattggcgaggttagaaaggatctgtaatagcccggcggtaattagtgccagcagggcgaccagcggatcgaagtgaccttgccaccatgccagcgctgtcccgacgataattgcagcaaaggcgagggggagggttttaggtcgtaaactttccagccacgcctgagttcggctaatttgttgttcagtcataatacgcgccaataaaaatggggcctttcagccccatcaaacaatgatgaaaatgattgaacgcgattataggataaaacggctcagatcttcatctgccaccaacgcatccagatgtttgctcacataatctgcgtcaatagtgatattttgaccgcttaaatcgctggcgtcgtaggaaatctcttccattaaacgctccagaacagtgtgtaaacgacgagcaccgatgttttcggtagattcgttcacctgccatgccgcttccgcgatgcgtttaataccggagtcggtaaactcgatatttacgccttcagtcgccatcagtgctttgtactgcacggtgatagaggcattcggctcggtcagaatacgctcgaagtcgctggtggtcagcgcctgcagttcaacgcggattggcagacgaccttgcagttccgggatcaggtcagacggtttcgcaatctggaacgcgccagaagcgataaacagaatgtggtcagttttgaccatcccgtgtttggtggaaacggtgcaaccttctaccagcggcagcaggtcacgctgaacgccttcacgagaaacatccggaccggaagactcgccgcgcttacagattttgtcgatttcgtcgataaacacgatcccgtgctgctcaacagcgtcgatagcgtcttgcttcagctcttccgggttcaccagtttcgccgcttcttcttcaatcagcagcttcatggcgtctttgattttcagcttacgcgctttttgcttctggccgcccaggttctggaacatggactgcagctggctggtcatctcttccatgcccggaggagccataatttcaacgcccatcggtgctgcggcaagatcgatctcgatttctttgtcatcaagctggccttcacgcagttttttgcggaatgcttgacgagcagcggacggttcctgctgctgttcggtctgtccccagttgtttttagcaggtgggatcagcacgtcgagaatacgttcttctgccagttcttcagcgcgataacggtttttctcgatagcctggacgcgtaccattttcacggcggcatcggtcagatcgcgaataatagaatccacttccttaccgacgtagcccacttcggtgaatttggtcgcttcaactttgatgaacggcgcattcgccagcttagccagacgacgggcgatttcagttttaccgacaccggtcgggccgatcatcaggatatttttcggggtcacttcatggcgcagctcttcgttgagctgcatgcgacgccagcggttacgcagagcaatcgccacagaacgcttggcgttgtcctggccgatgatgtgcttatccagttcgctgacgatttcgcgtggggtcatttcagacatgggagatccttacgctttgtagcttaattcttcgatggtgtggaaatggttggtatagatgcaaatgtcgcctgcaatatccaacgccttttcagcaatttcacgggcgctaagttcagtgttttctaacagcgcgcgcgccgcagcttgggcgtaagggccgccggagccgatagcaataagatcgttttctggctgcaccacgtcaccgttaccggtgatgataagcgatgcagtttcatccgcgactgccagcagtgcttcaagtttgcgcagcatgcgatcggtacgccagtcttttgccagctcaacggcggctttgaccagatggccctgatgcatttccagtttacgttcaaacagttcgaacagcgtaaaagcatccgcagtaccgcccgcaaagcccgcgatgactttgtcgttgtacagacggcggacctttttcacgttgcctttcattacggtattgcccaacgtggcctgaccatcaccagcgatgaccacatggccgttacggcgtacgcttactatagttgtcacgagctgaccccttggttacgaatacagagtacaaaccccgaacaaaagtacggggcataatgcaattatagatgggggggattttgagggtttcaacccccggcggcgagccgaatgcagtttgtatgacccgccatcttcaaccgattgagggtgctgtctgcgttctctttgcctttcaccgggccaatgaccacacgattccagccattgttggtggtgattttcgagtcaaagccttcgaacgccagctgagcacgtaccgtctctgcctgttccgcgcctctgaacgaaccgcactgcaccatccagcggcgttcgtcttttttctccgccgtcggttttggcgcgtcagcggcacgagcaactggcgcagcttgctgcggcttcgactgcgcagtcgtgtgcgcaggagtttgcagcagatcctggtacggctgctgagaagaagccggtttagactggcgcggttgcgcctgtaccggtgcggcttgcgacgtacgcgtctgctgctgccagctttgttcagtcgtacgcgactgctgagccaggcgttgctgttccgctaattgctgcgcctgacgttggcgctgtagcgtttgctgacgctgttccggcgtctgttcattccacggaacttcaaccagctgcgttggctgctggcgcatatcagcctgcatttgttcaagaagctgacgttgttctggtgtcagttgctccggcgttttcacttcaccaccggcagaaggttctgtgggcgcacgcactcccggctggcgactttccagctctttaatgtagcgccagcgttcttctggttttggtggtagtccgtttccggtcactttctggctttgcagcgtctcggactcttctttcttgtgatgcgtaatgaagtacagaccaccgataaaggtcacaagaacggcggcagcaatagcgaccatagcgggagaaaccgcaggcagatttcgttgctttttccgtgaggtgctcttttttcgccgcgaaggtgccggttggctgcggcgtacataatctcgttgtgccactatcgtttcgctgtatttattcgttcgtcagcccgccatgttacttaagcggcgggcctttgaccagtcacggcagtcttaaaggtttactttaaggtaacgcgcgtgttgatccccggatgataagttcgcagtccattaaacgagagccactgccaacgtgttgcccctgcatttgatcaagcaataacagcatagcttcccgaccgatttcgtaacgcggctgcgcgatggttgtcagcggcggatcacaaaattgcgtcaggtcgatgttatcaaaaccgattatggaaaggtcttccgggactttcagcccctggcgttttgcctgagaaagtgcgccgagcgccatcacatcgctatggcagaagacagcagtaggcggttgtggaagatcaagcagctgctgcatcgctttgcttccggcttcgaaggtgaagtcgccacgggcgatgtattgcggatcaaccataatgccgcagcgacgcagcgcctgaacatagccttgcaggcggtagtgacacagcggcatctcttcgggaccggctatacagccaatccgtttatgcccttgctcatataaataatttactgcatcaaatgcggcggtcagattgtcgatatgaactgtaggcagctccagctccggtgcaaattcgttcgccatcaccatcggcggcagattacgctgttcctcaatgctggcatcaaacggcagccttgaacccagcaacaacatgccatcaatttgcttggtgatgatcaaatcgataaaggttttttcctgctgattttgatgcgcacagtcgccaatcagcaccagatatccgtgatttgccgccgtaacttcgataccgcgaataatttcgctaaagaagggatcgcagatatccgggacaatcaccagaatggtgcgggattcattacgcttgacgttgcgccccataggctgcggtaaataacccacttcccgggccgctttttcaacccgattacgggtggcctgggagactttatcgggattcattaatgctcgggagacggtcgctgtagagacttttgccttgagggcaacgtctttcatggtcgcggcagtttcctgcttcttcgctttcacactcactcctcgcctggcacgtcaggcgtactacatccatgtttacttcacatcggcaacatttttagcagatagcgcgtgaaaacggttacagaattttcatgaaaagtgtgatgaatattgaatttttcgatccgcctcgcatcgtgagcggtttaaccctcaatcggatcaacatccagcacccatttcaccttacgggaatccggtattgtattgatgagcgccagcgtaccgttaatgatgtgttgcaagcgcacgcgggaagggtgctgcaacaatatctgccagcgccagcgaccgccacgtttaggtgccagagccggaaccggaccgagaacccacagtttctcgtctgccagtgggctggagaggatcagattacgcagttgttgcaggaacaatggcgcgtgctgattgttatgatcttccgcacgcacaatcacatggctggtccacggcggtagctgcatcattcgccgctcagccagcgcctgttcggcaaaggcgtcgtagcctttatagagcaacgtttgcaacagaggatgttccggatggtgcgtttgcagcaccacttcgccctgtttacccgcacgcccggcacgaccggcgacctgggtgtaaagctgagcgaaacgctctgccgagcgaaaatcggcagaaaacagcgcgccgtccacgtccagtaatgcaaccagcgtcacatccgggaaatggtgacctttcgccagcatttgtgtaccaatcaaaatccgcgcgccgccgcgatgtacttctgccagttgctgttccagcgcccctttgcggctggtggtatcgcggtcgatacgagaaatgggcacgccggggaacaacggcgcgagcgtctgttcaagctgttcggtgcccagccccacggggaccaggtgcgtggaaccgcaggaagggcactggcgcggcaccggacgctgactgtcacagtggtggcagcgcagatggtgctgcgcctgatgcagcgtgtagtagtgatcgcaacgtgggcattcggcaatccagccacagtcgtggcacagcagtgcaggcgcaaagccacggcggttaagaaagagaatgacctggttatcagcctgtaaatgctggcgcatacgagtgattaacgccggagccagacctgcctgcaccttctgaccttttaaatccagcacatgttgaattgccggacgcgcattccctgcccgacgggtcaggcgcagcaggcggtattttttctgctggacgttgcataacgtttccagcgcgggcgttgcggagccaagaataatcgggatttgctcgctgtgcgcacgatacaccgccaggtcgcgggcatgatagcgccagccttcctgctgcttgtaggagctgtcgtgctcttcatcaatgacaatcacgccgagatttttaaacggcgtaaacagcgcggagcgggtgccgatcacaatcgccgcctcaccatttttcgctttcagccacgccgaaagacgctcgctgtcgttcaggccggaatgcagaacttccacgggggcattaaaacgttcacgaaaacgggcgatagtttgcggtgtcaggccgatttccggcaccatcaccagcgcctgtttgccctgagcgagcacgttttccagtacgctgagataaacctccgttttaccggaaccggtaacgcccgccagcagccaggcagaaaaagtatctgccgcgctatgaattgcgccaacggcggtggcctgttcggtattcaatcgcaaccgctcaccagaaacggcatagttcgttcgccagtcgctaaactctggtgtttcacttgctaaatcacacagaccttttttgcgtagcgcctgcaacgcggcatcattaaattcgagcgtggcgacctggtcgcgccagattttgccttgccgtaacgccgccagcgcctgttgttgcttgggggagcgtttcaggctgttcagatccaccgcctggccttgttcagtggcaaaccagtaccacatcggcgcgttcgccgcaggccgcccctggcgtagtaaaatcggcaaggcatgaaacagcacatcgccaatcggatgatgatagtaatctgccgcccatagcagcaatcgccagacggagtgagtaaacaccggctcactatccagcacttcgactaccgcttttagctcattgagcggcagttcgctggcatcgctaactgataccacaatcccgatgcgctcctgctgtttgccaaacggcacgcgcacgcgacacccagctttaaccgtcatgccttctggcagcagatagtcaaaggtacgaggaagcggaacgggcaaggcaacgtgggcaacgggcatagcatcatcctgacttgaaattcggtgggttagtatacacattgccgtagaagagtgcggatcagtttgcatacgctggttaatttctgtatgatttcgcgccttcgtacgaaatgatcgtattgaagctatacttttaacatcgcgtggtgtctggcgttagggctggaagagcgacgcggccttaaaccgaggttttcccatgaaaaaagatattcacccgaaatacgaagaaattactgctagctgctcttgcggtaacgtaatgaaaatccgctccaccgttggtcatgacctgaacctcgacgtgtgcagcaagtgccacccgttcttcactggcaaacagcgtgatgttgctaccggtggccgtgttgaccgcttcaacaagcgtttcaacatcccgggcagcaaataagaccggatttccgaaaaaagcgccgcacggcgctttttttgtgcctgaattttggtcgtattaccacgaaaacagcggccattctttggcgaccgtggtgagttgtggcgcatcgaaaacggcttgtggcgagaccaccgtttcctcaagcggaatattcttgccgtaacgttctttgagctttgcctgaacttgtgggctgctcaggtcgaactctttcaacttctgctgctcgcccacgcgcattcccagcgcgttctggtaaaccttccacaccacttccgaacagtactggcgatcgtcgctccatgagaagctgaaatcatacggtttaccgagataacgttttgccgtttgcgccagtttttgctgttgttcaacactcagtccgccttcaacgcggcgaacaacgtatttgcccttttcaccatgggcgatccactgcttgagcggggtgtatttcaccgggccgactgcttcaaaaacgtagggctttttgttgcgtatcaccagcataccggtgtggctataatcggtatgggtcgccagttggatcgctttactttgcgatgagcgagagatctgaaagatgatgtcgccggtttgtggctgccaggcaaaggcaggtacagaaaccagcaggctgaggatcagcagcctgtttttcatagttaaacgtccatgtataaaaagcggtgggtcgcagacaacgtgctcgttgtttatgccggatgcggcgtgaacgccttatccggcctacaagttcgtgcaaattcaataaattgcaatatgacgtaggcctgataagcgtagcgcatcaggcgattccactccgcgccgctcttttttgctttagtattcccacgtctccgggttaatccccatctcacgcatgatctcttttgccgcttccgggatttcgtcgctgcgctctttacgcagatcggcatcatccggcaaaggttgcccggtaaaggcatgcagaaacgcttcgcacagcagctcgctgttggtagcgtgacgcaggttgttcacctgacgacgcgtgcgttcatcggtgaggatttttaacaccttaagaggaatggaaaccgtaatctttttgacttgttcactcttcttgccgtgctcagcgtatgggctgatatattcgccgctccattcagccatgagatacttaatcctcttcgtcaataaattgagaccagaccacacagttgatgtgggtactgaccgtaaacccgcatagtttaccgtacaggcgttaccgtgacatcgtgtaatgcacctgtcggcgtgataatgcatataattttaacggctatttgggatttgctcaatctatacgcaaagaagtttagatgtccagatgtattgacgtccattaacacaatgtttactctggtgcctgacatttcaccgacaaagcccagggaacttcatcacatgacgcgtaaacaggccaccatcgcagtgcgtagcgggttaaatgacgacgaacagtatggttgcgttgtcccaccgatccatctttccagcacctataactttaccggatttaatgaaccgcgcgcgcatgattactcgcgtcgcggcaacccaacgcgcgatgtggttcagcgtgcgctggcagaactggaaggtggtgctggtgcagtacttactaataccggcatgtccgcgattcacctggtaacgaccgtctttttgaaacctggcgatctgctggttgcgccgcacgactgctacggcggtagctatcgcctgttcgacagtctggcgaaacgcggttgctatcgcgtgttgtttgttgatcaaggcgatgaacaggcattacgggcagcgctggcagaaaaacccaaactggtactggtagaaagcccaagtaatccattgttacgcgtcgtggatattgcgaaaatctgccatctggcaagggaagtcggggcggtgagcgtggtggataacaccttcttaagcccggcattacaaaatccgctggcattaggtgccgatctggtgttgcattcatgcacgaaatatctgaacggtcactcagacgtagtggccggcgtggtgattgctaaagacccggacgttgtcactgaactggcctggtgggcaaacaatattggcgtgacgggcggcgcgtttgacagctatctgctgctacgtgggttgcgaacgctggtgccgcgtatggagctggcgcagcgcaacgcgcaggcgattgtgaaatacctgcaaacccagccgttggtgaaaaaactgtatcacccgtcgttgccggaaaatcaggggcatgaaattgccgcgcgccagcaaaaaggctttggcgcaatgttgagttttgaactggatggcgatgagcagacgctgcgtcgtttcctgggcgggctgtcgttgtttacgctggcggaatcattagggggagtggaaagtttaatctctcacgccgcaaccatgacacatgcaggcatggcaccagaagcgcgtgctgccgccgggatctccgagacgctgctgcgtatctccaccggtattgaagatggcgaagatttaattgccgacctggaaaatggcttccgggctgcaaacaaggggtaaaaatgagtgtgattgcgcaggcaggggcgaaaggtcgtcagctgcataaatttggtggcagtagtctggctgatgtgaagtgttatttgcgtgtcgcgggcattatggcggagtactctcagcctgacgatatgatggtggtttccgccgccggtagcaccactaaccagttgattaactggttgaaactaagccagaccgatcgtctctctgcgcatcaggttcaacaaacgctgcgtcgctatcagtgcgatctgattagcggtctgctacccgctgaagaagccgatagcctcattagcgcttttgtcagcgaccttgagcgcctggcggcgctgctcgacagcggtattaacgacgcagtgtatgcggaagtggtgggccacggggaagtatggtcggcacgtctgatgtctgcggtacttaatcaacaagggctgccagcggcctggcttgatgcccgcgagtttttacgcgctgaacgcgccgcacaaccgcaggttgatgaagggctttcttacccgttgctgcaacagctgctggtgcaacatccgggcaaacgtctggtggtgaccggatttatcagccgcaacaacgccggtgaaacggtgctgctggggcgtaacggttccgactattccgcgacacaaatcggtgcgctggcgggtgtttctcgcgtaaccatctggagcgacgtcgccggggtatacagtgccgacccgcgtaaagtgaaagatgcctgcctgctgccgttgctgcgtctggatgaggccagcgaactggcgcgcctggcggctcccgttcttcacgcccgtactttacagccggtttctggcagcgaaatcgacctgcaactgcgctgtagctacacgccggatcaaggttccacgcgcattgaacgcgtgctggcctccggtactggtgcgcgtattgtcaccagccacgatgatgtctgtttgattgagtttcaggtgcccgccagtcaggatttcaaactggcgcataaagagatcgaccaaatcctgaaacgcgcgcaggtacgcccgctggcggttggcgtacataacgatcgccagttgctgcaattttgctacacctcagaagtggccgacagtgcgctgaaaatcctcgacgaagcgggattacctggcgaactgcgcctgcgtcaggggctggcgctggtggcgatggtcggtgcaggcgtcacccgtaacccgctgcattgccaccgcttctggcagcaactgaaaggccagccggtcgaatttacctggcagtccgatgacggcatcagcctggtggcagtactgcgcaccggcccgaccgaaagcctgattcaggggctgcatcagtccgtcttccgcgcagaaaaacgcatcggcctggtattgttcggtaagggcaatatcggttcccgttggctggaactgttcgcccgtgagcagagcacgctttcggcacgtaccggctttgagtttgtgctggcaggtgtggtggacagccgccgcagcctgttgagctatgacgggctggacgccagccgcgcgttagccttcttcaacgatgaagcggttgagcaggatgaagagtcgttgttcctgtggatgcgcgcccatccgtatgatgatttagtggtgctggacgttaccgccagccagcagcttgctgatcagtatcttgatttcgccagccacggtttccacgttatcagcgccaacaaactggcgggagccagcgacagcaataaatatcgccagatccacgacgccttcgaaaaaaccgggcgtcactggctgtacaatgccaccgtcggtgcgggcttgccgatcaaccacaccgtgcgcgatctgatcgacagcggcgatactattttgtcgatcagcgggatcttctccggcacgctctcctggctgttcctgcaattcgacggtagcgtgccgtttaccgagctggtggatcaggcgtggcagcagggcttaaccgaacctgacccgcgtgacgatctctctggcaaagacgtgatgcgcaagctggtgattctggcgcgtgaagcaggttacaacatcgaaccggatcaggtacgtgtggaatcgctggtgcctgctcattgcgaaggcggcagcatcgaccatttctttgaaaatggcgatgaactgaacgagcagatggtgcaacggctggaagcggcccgcgaaatggggctggtgctgcgctacgtggcgcgtttcgatgccaacggtaaagcgcgtgtaggcgtggaagcggtgcgtgaagatcatccgttggcatcactgctgccgtgcgataacgtctttgccatcgaaagccgctggtatcgcgataaccctctggtgatccgcggacctggcgctgggcgcgacgtcaccgccggggcgattcagtcggatatcaaccggctggcacagttgttgtaatttcagaaatttaataatgcccggtactcatgttttcgggtttatggtttctaatgaaatatattgaattatcataggattaggccggattaagcgtttacgacgaatccggcaagaagcaataagtacatggttagtttatatttgcagtccggtttgctttgcataccggattttctttttcttaccatcctgaagttttttcatcttccctgatttttcctcaccatcattggtcatttttcggttgacgcccttcggcttttccttcatctttacatctggacgtctaaacggatagatgtgcacaacacaacatataactacaagcgattgatgaggtaaggtatgagcttttttcacgccagccagcgggatgccctgaatcagagcctggcagaagtccaggggcagattaacgtttcgttcgagtttttcccgccgcgtaccagtgaaatggagcagaccctgtggaactccatcgatcgccttagcagcctgaaaccgaagtttgtatcggtgacctatggcgcgaactccggcgagcgcgaccgtacgcacagcattattaaaggcattaaagatcgcactggtctggaagcggcaccgcatcttacttgcattgatgcgacgcccgacgagctgcgcaccattgcacgcgactactggaataacggtattcgtcatatcgtggcgctgcgtggcgatctgccgccgggaagtggtaagccagaaatgtatgcttctgacctggtgacgctgttaaaagaagtggcagatttcgatatctccgtggcggcgtatccggaagttcacccggaagcaaaaagcgctcaggcggatttgcttaatctgaaacgcaaagtggatgccggagccaaccgcgcgattactcagttcttcttcgatgtcgaaagctacctgcgttttcgtgaccgctgtgtatcggcgggcattgatgtggaaattattccgggaattttgccggtatctaactttaaacaggcgaagaaatttgccgatatgaccaacgtgcgtattccggcgtggatggcgcaaatgttcgacggtctggatgatgatgccgaaacccgcaaactggttggcgcgaatattgccatggatatggtgaagattttaagccgtgaaggagtgaaagatttccacttctatacgcttaaccgtgctgaaatgagttacgcgatttgccatacgctgggggttcgacctggtttataaatagtgtggcttttgtgaaaatcacacagtgatcacaaattttaaacagagcacaaaatgctgcctcgaaatgagggcgggaaaataaggttatcagccttgttttctccctcattacttgaaggatatgaagctaaaacccttttttataaagcatttgtccgaattcggacataatcaaaaaagcttaattaagatcaatttgatctacatctctttaaccaacaatatgtaagatctcaactatcgcatccgtggattaattcaattataacttctctctaacgctgtgtatcgtaacggtaacactgtagaggggagcacattgatgagcacgtcagacgatatccataacaccacagccactggcaaatgcccgttccatcagggcggtcacgaccagagtgcgggggcgggcacaaccactcgcgactggtggccaaatcaacttcgtgttgacctgttaaaccaacattctaatcgttctaacccactgggtgaggactttgactaccgcaaagaattcagcaaattagattactacggcctgaaaaaagatctgaaagccctgttgacagaatctcaaccgtggtggccagccgactggggcagttacgccggtctgtttattcgtatggcctggcacggcgcggggacttaccgttcaatcgatggacgcggtggcgcgggtcgtggtcagcaacgttttgcaccgctgaactcctggccggataacgtaagcctcgataaagcgcgtcgcctgttgtggccaatcaaacagaaatatggtcagaaaatctcctgggccgacctgtttatcctcgcgggtaacgtggcgctagaaaactccggcttccgtaccttcggttttggtgccggtcgtgaagacgtctgggaaccggatctggatgttaactggggtgatgaaaaagcctggctgactcaccgtcatccggaagcgctggcgaaagcaccgctgggtgcaaccgagatgggtctgatttacgttaacccggaaggcccggatcacagcggcgaaccgctttctgcggcagcagctatccgcgcgaccttcggcaacatgggcatgaacgacgaagaaaccgtggcgctgattgcgggtggtcatacgctgggtaaaacccacggtgccggtccgacatcaaatgtaggtcctgatccagaagctgcaccgattgaagaacaaggtttaggttgggcgagcacttacggcagcggcgttggcgcagatgccattacctctggtctggaagtagtctggacccagacgccgacccagtggagcaactatttcttcgagaacctgttcaagtatgagtgggtacagacccgcagcccggctggcgcaatccagttcgaagcggtagacgcaccggaaattatcccggatccgtttgatccgtcgaagaaacgtaaaccgacaatgctggtgaccgacctgacgctgcgttttgatcctgagttcgagaagatctctcgtcgtttcctcaacgatccgcaggcgttcaacgaagcctttgcccgtgcctggttcaaactgacgcacagggatatggggccgaaatctcgctacatcgggccggaagtgccgaaagaagatctgatctggcaagatccgctgccgcagccgatctacaacccgaccgagcaggacattatcgatctgaaattcgcgattgcggattctggtctgtctgttagtgagctggtatcggtggcctgggcatctgcttctaccttccgtggtggcgacaaacgcggtggtgccaacggtgcgcgtctggcattaatgccgcagcgcgactgggatgtgaacgccgcagccgttcgtgctctgcctgttctggagaaaatccagaaagagtctggtaaagcctcgctggcggatatcatagtgctggctggtgtggttggtgttgagaaagccgcaagcgccgcaggtttgagcattcatgtaccgtttgcgccgggtcgcgttgatgcgcgtcaggatcagactgacattgagatgtttgagctgctggagccaattgctgacggtttccgtaactatcgcgctcgtctggacgtttccaccaccgagtcactgctgatcgacaaagcacagcaactgacgctgaccgcgccggaaatgactgcgctggtgggcggcatgcgtgtactgggtgccaacttcgatggcagcaaaaacggcgtcttcactgaccgcgttggcgtattgagcaatgacttcttcgtgaacttgctggatatgcgttacgagtggaaagcgaccgacgaatcgaaagagctgttcgaaggccgtgaccgtgaaaccggcgaagtgaaatttacggccagccgtgcggatctggtgtttggttctaactccgtcctgcgtgcggtggcggaagtttacgccagtagcgatgcccacgagaagtttgttaaagacttcgtggcggcatgggtgaaagtgatgaacctcgaccgtttcgacctgctgtaatctgaccccgttcagcggctgcttgctggcagtcgctgaacgttctttaccagcgtatagtgggcgaacgaaaactacacactggatctctcatgtctgccgcaggaaagagcaacccactggcaatcagtggcctggttgtgctcacacttatctggagttatagctggattttcatgaagcaagtcaccagttacatcggtgccttcgactttaccgccttacgctgcattttcggcgctctcgttttattcatcgtccttttattacgtggtcgcggaatgcgcccgacaccgtttaaatacaccttagccattgccctgttacaaacctgcgggatggttggtctggcgcagtgggcgttggtcagcggaggtgcggggaaggtggcgatcctgagctataccatgccgttctgggtggtgattttcgccgcgttgtttctcggtgaacgcctgcgacgtgggcaatatttcgcgattctgattgccgctttcggcttatttttggtgttgcagccgtggcaactcgatttctcttcgatgaaaagtgccatgctggcaatcctctccggcgtcagttggggggcgagcgcgattgttgctaaacgtctgtatgcccgtcatccgcgcgtggatttattgtcgttaacatcctggcagatgctgtatgcggcgctggtgatgagtgtggtcgctttactggtgccgcaacgtgaaattgactggcagcccaccgtgttctgggcgctggcctacagtgcgattctggcgacggcactggcgtggagcttatggttgtttgtattgaaaaacttgcctgccagtattgccagcttaagcacactggccgttcccgtttgcggcgtactcttttcctggtggctgctcggcgagaatccgggggccgttgaaggtagcggtattgtgctgattgtgctggcactggcgctggtgagccgtaagaaaaaagaagccgtcagtgtaaaaaggatctgaattttttcttcatgtggggcgatctcttatttaacaaaataacgataatgccccaccatccgccagttaaacagcacatcttcttcctgcgcgcctgcgccaatgttatgtatcaccagcggcgtaccgtcgcgggcgaagccatctgaaaccaccccaatatgtgccagcccgttatccagtcgccaggagacaatatcgcccgcttgatagtcactggggttcttgctggtggggcgtgttttatcatggcggctaaaccaggtttccagattaggcacccgacggtgatcgatgttgctgtccgggcgctttaacttccatttttgcgggtactcagcaaaattcttcgccatatcttcgtgaaccagtttctgcaaatcgaccttctggctgcgcaatgcgcggatcaccacatcggaacatacaccgcgttcttgcggaacatcaccgccaggataagtaagctgcacatacgccggatcgtaaaatagcgtgctgccaatttgctgtctggcaccgtctgcgatggcaaggttggtattggcctggatttgtaccacggttggtggaacggcgggagattttaaggagtggctggtaaatgccgttagcaggctgagcagcgccagtgaagctttcatctggttcgtccgtgaaaataagagtcacagattcgaccttccgggctaacgattgttctgtagagaaaatgtccagaagcggataaaaaattcctgaacaacgtgggagtttcagattactggcacagagtgccggatgcggagtgaacgccttatccggcctacaaaagcacgcaaattcaatatattgcagagattgcgtaggcctgataagcgtagcgcatcaggcaattttgcgttcaaactcccggacaagccgggagtttggagtaggttattcccactcttgcaggaaacgctgaccgtactggtcggctaccagcagagcggcgtaaacctgatctggcgtcgcgccgccaggcatgttgtgaatggtttcaccttctgcacatgccgcttctgccacaattcgcattttcgccgggacatcttctttaatatccagttgagcgagagttattggcaaacctaccgcatggctaagggcagctacggtttcgatttcctccaccggcgcattttccagaaccagctgcgtcagcgtaccgaatgccactttttcaccgtgataatagtgatgcgcgtccgggatagcggtcaggccgttatgcactgcgtgcgccgcagccagaccaccactttcaaaaccaacaccgctcaaataggtgttcgcttcaatcacgcgctccagcgccggagtcactacatgctgttcggcagcaagcatcgctttttcgccttcttccagcagggtgttgtagcacagttcagccagtgccagcgcagcctgggtgcacttgccgcccgccatggtggtcgcgccgctacgagagcaggcacgcgcttcaaaccaggttgccagcgcatcgccgatacccgccgctaacagacgtgcaggtgcgccagcgacgattttggtgtcgacaatgaccatattcgggttatttggcaacagcagatagcggtcaaactcaccctcatcggtgtagataacagacaatgcgctgcacggtgcatcggtagaggcgatagtcggtgcgatcgctaccggaacacccatgaaatgtgccagtgctttggcagtatcgagggtttttccgccaccgataccgagaattgcgccacactgcgcagtctccgcgatgccacgcagacggtcgatctcattttgcgaacattcaccgccaaacggcgcaatttctactaccagtccagcatctttaaagcttttctcgacagtggattgagcaaaacctaaaacaaatttgtcacccaccactaaccagcgttctgccagcggcttcaggtattcgcccagacgattaatcacatcagcgccctggatgtatttacccggtgattgaataatgcggtccataattgctcctttagagatgagtagtgccaaatgcggcattccagtcgtgttcgaacttctctatagctgactctaccgcaggggtgttgagcatttgttgcgctacatctaagggcagggtgatggattcacatcctgccagtaaacagtccagcgcctgacgcggcgttttaaagctggctgccagcaccatgctttctggcgcgtgcatttctaacagcgtttgcagctcctgaaccgtacgaatgccgtctccgccctgggcatctacgcggttaacatacggagcaacgtattttgcccctgccagtgcggctaataacccttgtgcggcgctatatacagcagtgccaagtgtagtaataccctcttttttcagtattttaattgctgccagaccttcggaagtcaccgggattttcaccacaatacccggaatagcgtcgcgcaggcgcttcgcttcttccaccatcccctgcgcgtcgcggctcatggtctgagcaaacagaatgccctcatcaccaatcgctttttgcagacgcggcagcacttcccatatggactccttgctggcagcgataatgctcgggttagttgtcaccccggcaatggggaatatgcgtgccagacgttcgacttctgcgacgttagcggtgtccagatacagttccatgatgtttccttttacagttccagttcatgttgcagcaggctggcgatagcgtcggcagaggcggcgttaaccagcgcgttacggaattcttcgtgcatgatgcggcgagcgaggcgcgagaaaatgcgcatatgctgatcgcccgcagcgtgtttgttcagggttaacataatgatgaattgcgcttcatcatcgccccagcgcaccggcgcttgcagacgcgccacgctgatggtggattgctcaatgtgttctgatttgctgtgtggaatggcaaaactaaagcccagaccggtagagaaaacggcctcgcgcgcccacaagtcggcttccagtttacgcggatagcggcagcggcccgccagcagcaggttatcggtcatgcctttgagcacttcttctttgctgcgccagtcgctttccagtgtgatgcactcggcggtgaccagcggtgcgtcttgttgggtcatgcggaattgcgccagcaggtgttccacttccagcgaagtacggcaggccattgcctggttgagcaacttgcggcactcacggctatcaagttgcgccatccgagctttcgccgccggaattgatggtgcgctcatgctgagttcatccagccctaagccgaccagcaacggcagcacggaacctttcgctcccagctcaccgcacagaccaatccatttgccctggcgatgcaccgcttgcacggcgtaatcgagcgcccgcaagaatgccggattcaggctgttgtagtgacgagtaaccttagcgttatcgcgatccaccgccagcagatactgcgtcaggtcattactaccaatactaaagaaatcaatctcttcgcagcattgatcgatgatgaacatcaccgacggcacttccagcatgatgccgagctggattttctcatcaaacggaatgtgttcgttacgtagttgctgtttggcttccgccagtttttctttcacccataagatctcttccattgaggagatcatcgggatcatgattttcaggctgccgtgagcggaggcgcggaggatcgaccgtagctgcgtggtaaacaacgacgcgtactcttcataaatacgcacggcgcgataaccgaggaacgggtttgcctctgcgggaatgttcagataatcaacgggtttgtcgccgccaatgtccatagtgcgcacaataatgctgcgtccgttggcggattccagcgcctgacaaaaaatgttgtacaactcgctttcgcccggtgcgctggtgcgatccatatagagcatttcagtgcggaacaaaccaacgccttccgcaccattgccgaatgcggcctgcgcttccacggagtgagcgatgttagcggcaatttcaatgcggataccgtcagcggtacgggcttgttgggtcagccagacacgctgttgctcacgcagggcgtcctgtacgcgggcttcttgctgataataacgagctacggcttcccctggctcaaccacaatcgccccggcgttgccgtcgatataaatcgtttgttgctgccacggagtaagggcatcaatatccacaccaaccagcgttggaatgttgaacgaacgggcaaggatcaccgtatgtgaggtggtgccgccgcttttgagcaacaatcctttgaggtgatttttatccagttcgaggaactggctgggggtcagttcatcagccatacaaatggcgggctgcgtcagtttgcccggtgccgggaagcgttgctcaccgtagatttgctggagtaactggaagcagacgtcgcgtacgtccagggcacgttcttgcaggtagctgctgctggaacgggaaaactcttcgcaaaagtgattcgcgctggcaacaattgcttcggcgcagcttaatccggcgctgacgcctgccagtaaatgttcgcgcagggaagtatcgccagccagggatcggtgagcttccagaatcgcgctggtagcaccgtcgctatccagcagacgaaactcaatgtttttcagtaccagcgtcaggccgttttccagtgcggattgctcggcgtcaacgcctttggctgcgggaagattacccagcgcattgagatctaaagaagagatcggcgtcagaatgccgcctgcactaccgctgcacacggtgcgggcgcggataatttgcggattcagattggtcagtgaaaccggcagtggttccagttcgtcagatttaacttccgccagcggcgcatcgcagtgggggaattcatcgcgcagccattggcttaaacgctggtgcgcttcctgttcgtcggccccggaaatcagtaactggcagttatcgcccgccagcgtatcggtgccaatcagcgcaagggcgcttttggcgttgcccttgcggtcagtgcgcaggttatgccactcaatttgtgatgaaaaagtattacacagcgtttcaacgtggcttgccggacgcgcatgtacgccgttaggtagctcacaaataaattccacaatcagggccattgcctctctcccggtacggttttctgtttacaggataagagcgcacggcaacggcctgccatgtgacaaatctgccaaaagctggacaaatgtaatgtaaccgtcaatttgcgacgcgtctcacaagacgctgttttgcggcatgcttccggtttatcgcaagttatgaggcggatcgcatttttgtactgatattacaaaagtccagtaaatggcctttttatccactgtttgctccgcctgcgattgcctattgtttcctccatcaaaaatatggacatgggctttcgcaagcccgggagcagcttatgaatgagttggtgcagatcctgaaaaatacccgtcagcatttaatgacgggcgtttcacacatgattcccttcgtggtatcgggcggtattttgctggcggtttccgtcatgttgtatggcaaaggcgcagtgccggatgccgtagccgatccaaatctgaaaaaactgtttgatatcggcgttgcgggcttgacgctgatggtgcctttcctcgcagcgtacatcggttattccattgcagagcgttctgcgctggctccgtgcgctatcggtgcctgggttggtaacagctttggtgcgggcttctttggtgcactgatcgccgggattatcggcggcatcgtggtgcattacctgaagaaaattccggtgcataaagttctgcgctcggtgatgcctatcttcattattcctatcgtcggcacactgattaccgcaggcatcatgatgtggggcttgggcgagcctgtaggggcgttgaccaacagcctgactcagtggcttcaggggatgcagcagggcagcattgttatgctggcggtgatcatgggtctgatgctggcgttcgatatgggcggtccggttaacaaagtggcctatgccttcatgctgatttgcgttgctcagggtgtttataccgtggtggccatcgctgccgtgggtatttgtatcccgccgctggggatggggctggcgacgctgattggtcgtaaaaatttctccgcagaagagcgcgaaaccggcaaagcggcactggtgatgggctgtgttggcgttactgaaggggcgattcctttcgccgctgccgatccgctgcgtgtcattccttccatcatggtcggttcagtttgtggtgcagtaactgcggcgctggtcggtgcgcagtgctatgcaggctggggtggtctgattgtgctgccggtggttgaaggcaagctgggttatatcgcagcagtggctgtcggagcagtggtgacggctgtttgtgtgaacgtgctgaaaagtctggcgcgtaaaaatgggtcttcgactgatgaaaaagaagacgacctggatttggattttgaaattaattaattgaggaacgagccatgacgaaaattattgcagtaaccgcatgtccttcaggtgttgcccatacctatatggcagcagaggcgctggaaagtgccgcgaaagcgaaaggctgggaagtgaaagtagaaacccaggggtcaattggtctggaaaatgaactgactgcggaagatgtggcgagcgctgatatggtgattctgaccaaagatatcggcatcaagtttgaagagcgttttgctggcaagaccatcgtgcgcgtcaacatcagcgatgcagtaaaacgtgctgacgccattatgagcaaaattgaagctcacctggcgcaaaccgcttaagttcttctcccgctcgcaagggcgggttcgctttcccacaggagttcctcatgacgaatcgtatctctcgcctcaaaactgcactgtttgccaatacccgtgaaatctcgctggagcgggcgctgctttataccgccagccatcggcaaaccgaaggcgaaccggtgatattgcgccgggcgaaagcaacagcgtatatccttgaacatgttgaaatttcgattcgtgatgaagaactgattgccggtaaccgcaccgtaaaaccgcgcgccgggattatgtcgccggaaatggacccttactggctgctgaaagagctggatcaattcccgacgcgtccgcaggaccgctttgctatcagcgaagaagataaacgtatctaccgtgaagagttgttcccgtactgggaaaaacgttcgatgaaagatttcatcaacgggcagatgacagatgaagtaaaagccgcgaccaacacgcagattttcagcatcaaccagacggataaaggccaggggcacattattattgattacccacgcctgttgaatcacgggctgggtgagctggtggcacagatgcagcaacattgtcagcaacagccggagaatcacttttatcaggccgcgttgttactgctggaagcctcgcagaaacacattttgcgttacgccgaactggcggaaacgatggcggcaaactgcacagatgcccagcgtcgcgaagagctgctgactattgcagagatctcccgccataacgcgcaacataagccgcagacgttctggcaggcgtgccagttattctggtacatgaacatcattctgcaatacgaatccaacgccagttcgctatcgttggggcgcttcgaccagtatatgttgccgttctatcagacatcattaacccagggcgaagatgcggcgttcctgaaagaactgctcgaatctttatgggtgaaatgcaacgacatcgtgctgttgcgctccaccagtagcgcgcgttatttcgccggtttcccgaccggctataccgcactgctcggcgggttaaccgagaacggacgtagcgcggtgaacgtgctttcgttcctttgccttgacgcctatcaaagcgtgcaattaccgcaaccgaacctcggcgtgcgcactaacgccttgatcgacacgccgttcctgatgaaaaccgccgaaaccattcgcttcggcaccggtattccgcaaatctttaacgatgaagtggtggtgccagcgttcctcaaccgtggcgtttcgctggaagatgcgcgcgactattccgtagtgggctgtgtggaattatctattcccggcagaacctacggcttgcatgacatcgcgatgtttaatctgctgaaagtgatggaaatctgcctgcatgaaaatgaaggcaatgctgcgctgacttatgaaggtttactggagcagatccgcgccaagatcagccactacatcaccctgatggttgagggcagcaatatttgtgatatcggccatcgcgactgggcacctgtaccgctgctctcatcgtttatcagcgattgtctggaaaaaggccgcgatattaccgatggcggcgcgcgttataacttctccggcgtacaggggatcggtatcgccaacctgagcgattctctccatgcgttgaaagggatggtttttgagcaacagcgtttaagttttgacgaattgctgtcggtattaaaagccaacttcgcaacgccagaaggcgaaaaagtccgcgctcgcttaattaaccgcttcgagaaatacggtaacgatatcgacgaggtggataacatcagcgccgaactgttgcgccactactgcaaagaagtggaaaaataccagaacccgcgcggcggctacttcacgccgggatcgtataccgtttctgctcacgtcccgttgggatcggtggttggcgcgacgccagacggtcgttttgccggagaacagctggcagacggcggcttgtcacccatgctgggccaggacgcacaagggccaacagcggtactgaagtcagtcagtaagctcgataacacgctgctgtctaacggtacgttgctgaacgtgaaattcactccggcgaccctggaaggtgaagcaggattacgcaaactggccgacttcttacgggcgtttacccagcttaagttacaacatattcagtttaacgtggtgaacgccgacacgttgcgggaagcgcaacagcgcccacaagattatgccgggctggtggtgcgcgttgccggatacagcgccttctttgtcgaactgtcgaaggagatccaggatgacatcatccgccggacagcgcatcagctgtaacgttgtggaaacgcgccgcgatgatgtggcgcgcattttcaacattcagcgttattcactgaatgacggcgagggcattcgtacggtggtcttttttaaaggctgtccgcatctttgcccgtggtgtgctaatccggagtcgatctccggcaaaatccagacggtacgcagagaggcgaaatgtctgcactgtgcgaaatgtttgcgtgatgcggatgaatgcccctccggggcgtttgaacggattggtcgcgatatcagccttgacgctctggaacgggaagtgatgaaagatgacattttctttcgcacgtccggcggcggcgtcacgctttctggcggcgaagtgttaatgcaggcggagtttgctacccgttttttacagcgactgcggctgtggggtgtgtcatgcgccattgaaactgccggagacgcaccagccagcaagctattaccgctggcgaaattgtgcgatgaagtgttgttcgatttaaaaattatggacgcgactcaggcgcgggatgtggtgaagatgaacctgccacgcgtgctggagaatctgcgtttgctggtgagtgagggcgtcaacgtgatcccgcgtttaccgctgatccctggtttcacgctcagccgggagaatatgcagcaggcgctggatgtactgatcccgctgaatatcaggcagatccatctgttaccgtttcatcagtacggcgaaccgaaataccgcctgctggggaaaacatggtcgatgaaagaggtgcctgcgccgtcgtcagctgatgtggcaacgatgcgcgaaatggcagaacgggccggacttcaggttaccgtgggaggttaaaatggcatacctggtggcagtaaccgcctgcgtaagcggcgtggcgcatacttatatggcggcggaacggctggaaaagttgtgcctgttagagaagtggggagtcagcattgaaactcagggcgcgctgggaacggagaatcgtttagcggatgaggatatccgccgggcggatgttgctctgttgattacggatatcgagcttgccggtgccgagcgatttgaacattgccgctatgtgcaatgcagcatctacgcattcctgcgtgagccgcagcgggtaatgagcgcggtgcgcaaagtgctttctgcgccgcagcaaacccatcttattctggagtagtcggtttttctgtcagttggctgtggtactgccggcgatattccgacggcgagcgttcggtgtttttacgaaacagacggcagaagtagttgctgtcgacaaagccgcaggcgtgcgccacttcttttaccttcaggtcatagcctttcaataacgtcttagcgtgctccagtcgcgtgtgattcaggtattcgttaaaaccaatggcccccgttttttgaaacaggtgcgagaggtaatttggcgaaatataaaacgcctgtgcaacagattcgcgggtaagcgcggaggcatagcgttcgtcgatataatcgcgaatagcttcaaatagtgcctggctgcgtgaggcggtctggatttggctgccaagcaaatcgcggcagtggctaagcaggctggcgacgataagccttgccgtttgctgctcctgcggctgcatttgcatttcattgagcgtttgtagcagaaaagaacctatgcgtgggccgcgtcgggcgacgtgttgcttcgccagattttgatattgtttgccatcccattgcacgacgctgaagccgagttgctgtttgccaaacagcacgctaaaggtagtagcgggggcttgccattgtggaaaattccagccaccagcaggaacgtacagcacatcgccgggaactaacgttgctccagcgccggtatcaacaaactcaccttccagcacaatttccagccgtggaaaatcgacctgatacgcaagatcgggcaccgggccgttactgctggcaaagtaaatctggcgcagggacagcgggccgttgatcaggcgggagagcagatagctgacgtcgtgatacatgttattcccttaggtatgtagacgggaaaacagtaactggcattattaaaaaaggccacctgaaaagtgtggcctgaggggagttcgatgtaaacattgcggcagttgtattgccggatgtggcgtaaacgccttatccagcctaccgccgcgatctgtaggccggataagacgcgtcaagcgtcgcatccggcaaatagcgcctggctgataattactgattacccacctgatcgccatagggcagtgtgtcgtaatcgatcagtgcgtttttcttatacgggttaccaatccagcgggtagtttctttgaactgcggattcaccactgaacgggttggatcgtaaccgtcgtaagataagcccgccaaatctgaccaggtgtggatcagttccgccaggctgtatttacgatcaacatcctgcgagaaatcacggggatgagtcgcttgccatttttctgacgtccacagcaggaacggaatggtgtacatatgacgcgtcgggttgtcctcattacgcccctgagttttgtgcggcggcgtgtcgtaaacctcttcaccgtggtcagagaaataaaccaggaaaccgttcgggtttgctgctttaaagtctttaatcaggctggcaaccacatgatcgttatacaggttagcgttgtcataatcgttatatgactccagctcttccgcgtttaatcccggcggaacatgatcggtattgccatcaaacttgccctgattttccgggtagcggtatttgtatttgatatgcgtacccagcagatgaacaatgatcagtttcttcggcgcagggtcattcagcacttcctggaacggcttcagcacgttggtgtcgtattcacgcgcactctgcgtacgttgctggttcatgtagtactgcttgtcggtctggcgcgaaaataccgtcagcatggtattgcgggcggtcatcgtctgctggttggtgatccagaaggttttataacccgcctgtttcatcatgttcatcagcgacggctgcgtcagatacagatccgggttcttttcattggcaaaggtcagcgcctgttgcaggatttcaatggtgtacggacgagacgtaactacgttattaaacacggtcagattcggatcggttttatgcagcgcatccagctccggcgtggtttcacgcggataaccgtacagactcatgcgtccgcgctgggtcgactcgccaatcaccagcactaaagtgcgcggttcgttacccgattcatctttgaaattagccagtggcggcaaggcattattttcattcagtaactttgttagcgagtttagttgctgacgatactgataatagccggtcaggaattgccacggtgcggcaggctccatacgcgaggccaggttatccaacgttttctcaaacggcttgtttttgataaacgtattcatggcgatcggatgcagaatcaagccataaagcagggcaaaagagacaacataacgccacggctttggaatatagaccgggcgcaggcgtgtccacagcagaactgccaccgccgtataggccagcgcgataagcacaattttcaggctgaaatactggcttaaatactcgctggcttcgttggtgttggtttcgaacatcacaaacagaacgctctgcgagaactcctgaccgtagatgacgtagtagcacagcgccgccagagaggccgcccatagcaccacgccgattactgcggcaataattttaatccgcttcggaaagaggaataccgggatcaaccacagcgaactgaataacagcgagtcgcgaatgccgttagtgccactataaccactgatgtaaataatggcctgtagcagagtagagaaaaaccaaaagtagagcagtgcccaacccagggctttccagctaaaaagaggtttagcctggacttctgtggaatgcatagtaagaacctgtcttgaaaaaatatcgccgaatgtaacgacaattccttaaggatatctgaaggtatattcagaatttgaataaaatgcagacagaaatatattgaaaacgagggtgttagaacagaagtatttcagaaaaccctcgcgcaaaagcacgagggtttgcagaagaggaagattagccggtattacgcatacctgccgcaatcccggcaatagtgaccattaacgcttgttcgacgcgaggatccggttcctggccttctttttctgcctggcgggagcggtgcagcaactcggcctgcaatacgttcagcgggtcggtgtaaatattccgtagctgaatagactctgcaatccacggcagatcggccatcagatgggaatcgttggcaatcgccagcaccactttgatgtcttcttcttgcaggttgcgtaactctttacctaacggccacagtgctttgtctaccaggcgttggtcatagtattccgccagccacaggtctgctttggcgaagaccatctccagcatgccgagacgcgtcgagaagaatggccaatcgcggcacatagcctccagctcgctctgtttgccgtcttcgaccactttttgcagcgccgtacctgcacccagccaggcggggagcatcagacggttttgcgtccaggcgaagatccacggaatggcgcgtagtgactcgacgccgccggttgggcgacgtttcgccggacgtgaacccaacggcagtttgcccagttcttgttccggcgtagcggagcggaagtaaggcacaaaatctttgttttcacgtacgtagccgcggtagacatcgcaggagatgactgacagttcatccataatgcgacgccagctctctttcggctccggcggtggcagcaggttggcttccagaatcgccccggtataaagcgacaggctgctgacggtgatttctggcagaccatatttaaagcggatcatctcgccctgttcggttacgcgcaggccgcctttcaggcttcctggcggttgtgacagcagcgccgcatgagcaggtgcgccgccgcgaccaatggaaccgccgcgaccgtggaacaacgtcagctcaatacccgctttttcgcaggttttgattaatgcatcctgtgcctgatattgcgcccaggaagctgccatcactcccgcatcttttgctgagtcggaatagccaatcatcaccatctgtttgccctgaatcaggccacgataccagtcaatattgagcagctgggtcatgacatcgttggcgttgttcagatcatcgagggtttcaaacagcggagcaaccggcatcgcaaacccgatacccgcttctttcagcagcaggtggacagccagtacgtcggacggcgttttcgccatcgagatcacgtaggcggcaatggagccttgcggtgcttcggcaatcacctggcaggtatcgagcacttcgcgcgtttcggcgcttggttgccagttgcgcggcagaagcggacgtttggagttcagttcgcggatcaggaacgcctgtttgtcggcctctgaccagctttcgtagtcgccgataccgaggtagcgggtcagctcgcccagcgcttcggtatgacgcgtgctctcctgacggatatcaatacggaccagcggtacgccgaaacatttcacgcggcgcagggtgtcgagcagatcgccgttggcgataatacccatgccacacgcctgaagtgactggtagcaagcgtagagcggttcccacagttcttcgttttgtgtcagcaggccttctggttttggcagttcttcgcctttcaggcgcgcttccagccatgcctgtgtcgccatcaggcgagaacgcaggtttttcatcagatagcgatacggttctgcggcaccttcttcgccaaccagcgccagcagttcaggggtcgcttcaaccatcgacagttcagaaaccagcacctgaatatctttcaggaacaaatcggtggctttccagcggctgagtagcaggacgtggcgggtgatatcggcagtgacgttcgggttgccgtcgcggtcgccgcccatccacgaagtaaaacggaccggaacaaattcgacgggcagtttgtagccgaggttctcttccagttgttcgttcagttcgcgcaggtaatttggtacgccttgccacaggctgttttccactacggcaaagccccatttggcttcatctaccgggcttggacgcagcttacggatttcatcggtatgccatgactgggcgatcaactggcgcaggcgacgcatcagctggttgtgttcgtagtcagcgatatctttgttatcgagctgttttaaacaggcgttcacttccaccattttgtggatcagtgtacgacgggtaatttcggttgggtgagccgtgaggaccagttccagcgacagcgattccactgcttttttgatggtgtcttcgctcagttccggctggtttttcagtttacgcagggtgcgggcgatcacttccgggttgctggcagcttcgcctttcggcgaaatgctgtggtattgctcggcggtgttggccaggttcaggaactgactaaacgcacgcgcaacgggcagcagctcgtcgttcgacaaattttgtaaggtggtgagcaactcctggcggttagcatcattgccagcgcgtgaagatttcgacaacttacggatagtttctacgcgttcaagaatgtgttctcccaacgcatccttgatggtttctcccagcactttgccgagcatactgacattactacgcaatgcggaatattgttcgttcatattaccccagacaccccatcttatcgtttgatagccctgtatccttcacgtcgcattggcgcgaatatgctcgggctttgcttttcgtcgtcttttataaagccacgtaaaagcggtgacgtcaaatgctgcgaaatcgcttcagcaaacgaataaatagcaggaatttacgtcattaaattcacgacgctttaaataagcgtaacttatggaaatgttaaaaaatcgccccaagtaacaccaaaggtgtaggtcggataagatgcgcaagtatcgcatccgacattattgcggcactggagtttggcaacagtgccggatgcggcgcgagcgccttatccggcctacagttgggcatcgtttgagtcactgtcggtcggataagatgcgcaagtatcgcatccgacattattgcggcactggagtttggcaacagtgccggatgcggcgcgagcgccttatccggcctacggttgggcatcgtttgagtcactgtaggtcggataagatgcgcaagcatcgcatccgacattattgcggcactggagtttggcaacagcgccggatgcggcgcgagcgccttatccggcctacgttttaatgccagcaaaaatggtgaattacctgggttatcagttcgcgggtgggcttgataaaccgtgtttccagatattcatcaggttgatgagcctgattaattgagccaggccccaacaccagcgtcgggcataacgtttgaataaacggcgcttcggtacagtagttcaccacttcggtttttgctccgagcaatttctcaaccacttcaaccagttgatgattcggtgggcattcatagccagggatcggcggatgcagctcgtcgaccgtcagacgacccggccagcgttcgctcaccggagccaatgcatcgttgagcaaaccattaagttcattgagtgtcatgccaggcagcggacgaatatccatatgcaactcacagcaagcgcaaatacggttagaagcgtcgccaccgtgaatatgcccgaggttgagcgtagggtatggcacggtaaacgcttcgtagtgataacgttctttcaggttatcgcgcaattgcaaaatatgcccgatggcgtcgtgcattagttcgatagcgttaacaccgcgtgctggatcgctggagtgccccgactggccctgaatacggatggcgttagagatatgacctttatgtgcgcgtaccggttgtagtgacgtcggttcgccaatgatggcgcaatccgggcgcagggcggtagtttcggcaaaataacgcgctccggccatactggtttcttcatcagcagtcgccagaatgtagagcggttttttcagtttcgtgacgtcgacatcgcgtagcgcatcaaggataaacgcaaaaaagcctttcatgtcggcggtgcctaagccgtaaagcttgccgtcatgctccgtcagtgtaaacggatcgcgcgtccagcgaccgtcatcaaatggcaccgtatcggtatgccccgccagcaacaagccgccagccccctgtccgatacttgccagcatattgaatttgttgcgagttcctggaacaggctgcacttccacattgaagcccaaatctttaaaccagtccgccagcagagtgattaaatctgcattgctttgatcgagtgcctcttccgtggcgcttattgaaggtgtggcaatcagagcgcggtaaatctcgataaatggcggtaatttgtttttcattgttgacacacctctggtcatgatagtatcaatattcatgcagtatttatgaataaaaatacactaacgttgagcgtaataaaacccaccagccgtaaggtgaatgttttacgtttaacctggcaaccagacataagaaggtgaatagccccgatgttgaatacgctgattgtgggtgccagcggctacgctggcgcagagctagtgacctatgtaaatcgccatccgcatatgaacataaccgctttgactgtttcagcgcaaagcaatgatgcgggaaagttaatctccgatttgcatccgcagctaaaaggcatcgttgatctgccgttgcagccgatgtcggatatcagcgagtttagcccaggggtggacgtagtgtttctcgccaccgcccatgaagttagccacgatttagcgccgcagtttcttgaagcgggctgcgtggtgttcgacctttccggcgcgtttcgtgttaacgacgccaccttctatgaaaaatattacggctttacccatcaatacccggaactgttggaacaggcagcctacggtctggcggagtggtgcggtaataaattaaaagaagcgaatttgattgcggtgccgggctgttatccgacggcggcacagctggcgctgaaaccgttgattgatgccgatcttcttgacctcaatcagtggccggtgatcaacgccaccagcggcgtgagcggtgcagggcgtaaagcggccatttcaaacagcttttgtgaagttagcctgcaaccgtatggcgtctttactcatcgccatcaaccagagatcgccacacacctcggtgctgacgttatcttcaccccacatctgggcaatttcccgcgcggcattctcgaaaccattacctgccgcctgaaatcgggtgtgacccaggcgcaagtcgcgcaagtgttacagcaggcgtatgcccataaaccgctggtgcggctgtatgacaaaggcgttccggcgctgaaaaatgtcgttgggctgccattttgcgatatcgggtttgccgttcagggcgagcatctgattattgtggcgaccgaagacaacttactgaaaggcgcggcggcacaagcggtacagtgcgccaatattcgtttcggctatgcggaaacgcagtctcttatttaagggtgcaatgatgaatccattaattatcaaactgggcggcgtactgctggatagtgaagaggcgctggaacgtctgtttagcgcactggtgaattatcgtgagtcacatcagcgtccgctggtgattgtgcacggcggcggttgcgtggtggatgagctgatgaaagggctgaatctgccggtgaaaaagaaaaacggcctgcgggtgacgcctgctgatcagatagacattatcaccggagcactggcgggaacggcaaataaaaccctgttggcatgggcgaagaaacatcagattgcggccgtaggtttgtttctcggtgacggcgacagcgtcaaagtgacccagcttgatgaagagttaggtcatgttggactggcgcagccaggttcgcctaagcttatcaactccttgctggagaacggttatctgccggtggtcagctccattggcgtaacagacgaagggcaactgatgaacgtcaatgccgaccaggcggcaacggcgctggcggcaacgctgggcgcggatctgattttgctctccgacgtcagcggcattctcgacggcaaagggcaacgcattgccgaaatgaccgccgcgaaagcagaacaactgattgagcagggcattattactgacggcatgatagtgaaagtgaacgcggcgctggatgcggcccgcacgctgggccgtccggtagatatcgcctcctggcgtcatgcggagcagcttccggcactgtttaacggtatgccgatgggtacgcggattttagcttaagttttgttggccggaggcgcagctttccggcattgaatttcaaaataaggaaacagagttatggcactttggggcgggcgttttacccaggcagcagatcaacggttcaaacaattcaacgactcactgcgctttgattaccgtctggcggagcaggatattgttggctctgtggcctggtccaaagccctggtcacggtaggcgtgttaaccgcagaagagcaggcgcaactggaagaggcgctgaacgtgttgctggaagatgttcgcgccaggccacaacaaatccttgaaagcgacgccgaagatatccatagctgggtggaaggcaaactgatcgacaaagtgggccagttaggcaaaaagctgcataccgggcgtagccgtaatgatcaggtagcgactgacctgaaactgtggtgcaaagataccgttagcgagttactgacggctaaccggcagctgcaatcggcgctggtggaaaccgcacaaaacaatcaggacgcggtaatgccaggttacactcacctgcaacgcgcccagccggtgacgttcgcgcactggtgcctggcctatgttgagatgctggcgcgtgatgaaagccgtttgcaggatgcgcttaagcgtctggatgtcagcccgctaggctgtggcgcgctggcgggaacggcctatgaaatcgaccgtgaacagttagcaggctggctgggctttgcttcggcgacccgtaacagtctcgacagcgtttctgaccgtgaccatgtgttggaactgctttctgctgccgctatcggcatggtgcatctgtcgcgttttgctgaagatctgattttctttaacaccggcgaagcggggtttgtggagctttctgaccgcgtgacttccggttcatcattaatgccgcagaagaaaaacccggatgcgctggagctgattcgcggtaaatgcggccgggtgcagggggcgttaaccggcatgatgatgacgctgaaaggtttgccgctggcttacaacaaagatatgcaggaagacaaagaaggtctgttcgacgcgctcgatacctggctggactgcctgcatatggcggcgctggtgctggacggcattcaggtgaaacgtccacgttgccaggaagcggctcagcagggttacgccaacgccaccgaactggcggattatctggtggcgaaaggcgtaccgttccgcgaggcgcaccatattgttggtgaagcggtggtggaagccattcgtcagggcaaaccgctggaagatctgccgctcagtgagttgcagaaattcagtcaggtgattgacgaagatgtctatccgattctgtcgctgcaatcgtgcctcgacaagcgtgcggcaaaaggcggcgtctcaccgcagcaggtggcgcaggcgattgcttttgcgcaggctcggttagggtaagaacatttatatgtataaatttgagcctggcttatcgccgggcttttttatggcaaaaaaaagcggatcctggagatccgcaaaagttcacgttggctttagttattcgagttgagaaactctcgaaacgggcagtgacttcaagggttaaaagaggtgccgctccgtttctgtgagcaattatcagtcagaatgcttgatagggataatcgttcattgctattctacctatcgccatgaactatcgtggcgatggaggatggataatgaatattcgtgatcttgagtacctggtggcattggctgaacaccgccattttcggcgtgcggcagattcctgccacgttagccagccgacgcttagcgggcaaattcgtaagctggaagatgagctgggcgtgatgttgctggagcggaccagccgtaaagtgttgttcacccaggcgggaatgctgctggtggatcaggcgcgtaccgtgctgcgtgaggtgaaagtccttaaagagatggcaagccagcagggcgagacgatgtccggaccgctgcacattggtttgattcccacagttggaccgtacctgctaccgcatattatccctatgctgcaccagacctttccaaagctggaaatgtatctgcatgaagcacagacccaccagttactggcgcaactggacagcggcaaactcgattgcgtgatcctcgcgctggtgaaagagagcgaagcattcattgaagtgccgttgtttgatgagccaatgttgctggctatctatgaagatcacccgtgggcgaaccgcgaatgcgtaccgatggccgatctggcaggggaaaaactgctgatgctggaagatggtcactgtttgcgcgatcaggcaatgggtttctgttttgaagccggggcggatgaagatacacacttccgcgcgaccagcctggaaactctgcgcaacatggtggcggcaggtagcgggatcactttactgccagcgctggctgtgccgccggagcgcaaacgcgatggggttgtttatctgccgtgcattaagccggaaccacgccgcactattggcctggtttatcgtcctggctcaccgctgcgcagccgctatgagcagctggcagaggccatccgcgcaagaatggatggccatttcgataaagttttaaaacaggcggtttaaaccgtttaacgcagctacccgataggcttccgccatcgtcgggtagttaaaggtggtgttgacgaagtactcaatagtgttgccgccacctttctgttccataatcgcctgaccgatatgaataatttcggcagcgcgctcgccaaagcagtgaatacccagaatctcttttgtttcccgatggaacaaaattttcagcgtgcccacgttcatgccgacgatttgtgcgcgtgccagatgtttaaactgggcgcggcccacttcatatggcactttcattgcggtcagctgctgttcggttttgcccacagagctgatttccgggatggtgtaaataccggtagggatatcttcaatcagatgtgcggtggcttcgccttttaccagcgcctgcgcggcaatgcgcccctggtcataggccgccgacgccaggctcggataaccaatcacgtcgcccaccgcgtaaacgtgtggctgtgcggtctgatacatgctgttgaccttcagctgtccgcggctgtcagtttctagcccaatgttctgtaacgccagcgaatcggtattaccggtgcgaccgttggcatagagcaggcagtcagctttcagttttttacccgacttcagatgcatgatcacaccatcgtcacagccttcgatcttctcgtactcttcgttgtgacgaatcactacgccactgttccagaagtgataggagagagaatctgacatctcttgatcgagaaatgccagcaggcgatcgcgggtgttgatcagatccacttttacatccataccgcggaagatcgacgcatattcacagccgatcactccagcaccatagataagtacatggcgcggttcgtggtgcatgctgagaattgagtcgctgtcgtaaatgcgtggatgggtgaaatcaacatctgttggatgatatggacgagagccgcaggcaataacaaatttttcagcggttagtgtttcaacgctgccgtccgggcaatccagcgccaacgtatgctcgtcaacaaagcgagcgtttccctgcaatatttcacagtgattacgttcgtaaaatccctgacgcatgcgcgtttgttgattaatcacgttatcggcatggttaaggatatcggcaaaagaagagcggagcagtcgggaatggtcgctgtaaagtgggttttgattgaattctataatgcggctgacggcgtgacggagagctttcgacgggatggtgccccagtgggtgcaaccgccgccaacattttgataacgctcgataactgcgacgcgcgcaccttgcttaaccaggcccattgcagcgccttcgccgccggggccggaacctattactatggcatcgtaatcgtaggaatgtggcatggtagggcttacctgttcttatacataaaagcaacagaatggtaacattttatcgcgggtaagccaattgatccccgtcatttatctggctatatcctgagcggcctttgctttgtctgtttcttacttttgccctgacgttttattggatttttatcgacgatactctccgtttaagcggcaggtttccgctgtacgtaaaagaaccggccaaagaattgcagtaaatatgttttattgcgttaccgttcattcacaatactggagcaatccagtatgttcattctctggtatagtgccagcagtacttttggcaaggattcagacatcgtgatgggcgtaagagcgcaacaaaaagaaaaaacccgccgttcgctggtggaagccgcatttagccaattaagtgctgaacgcagcttcgccagcctgagtttgcgtgaagtggcgcgtgaagcgggcattgctcccacctctttttatcggcatttccgcgacgtagacgaactgggtctgaccatggttgatgagagcggtttaatgctacgccaactcatgcgccaggcgcgtcagcgtatcgccaaaggcgggagtgtgatccgcacctcggtctccacatttatggagttcatcggtaataatcctaacgccttccggttattattgcgggaacgctccggcacctccgctgcgtttcgtgccgccgttgcgcgtgaaattcagcacttcattgcggaacttgcggactatctggaactcgaaaaccatatgccgcgtgcgtttactgaagcgcaagccgaagcaatggtgacaattgtcttcagtgcgggtgccgaggcgttggacgtcggcgtcgaacaacgtcggcaattagaagagcgactggtactgcaactgcgaatgatttcgaaaggggcttattactggtatcgccgtgaacaagagaaaaccgcaattattccgggaaatgtgaaggacgagtaatgaaacaagcaaatcaagatagaggtacgctgctgctggcgttagttgctggcttatcgattaatggtactttcgcagcgctgtttagctccattgtgccattttctgtattcccgattatttccctggtgctgacggtttactgcctgcatcaacgttatcttaatcgcactatgccggtaggcttgccgggtctggcagctgcctgttttattctcggcgtactgctgtacagcacggtagttcgtgcggaatatccggatatcggctctaacttcttcccggcagtactctccgtcattatggtgttctggattggcgcgaagatgcgtaaccgtaagcaggaagttgctgagtaatcggtattatgccggatgctggcgcatccggcatgggttttacttcgcggtcagtaatacgccgcactccatatggtgcgtgtaggggaactgatcaaacagagccagacgttcgaccttgtgcgtctggcttaatgtttccagattcttgcataacgtttccgggttacaggagatgtacaaaatacgcggatacgcctgcaccattttctcggtttcactgtccagaccgctgcgcggtgggtcgacaaaaatggtttcgcactgataactctttaagtcgatcccttgcaggcggttaaactcgcgcacaccattcatcgcctgagtaaattcttctgccgccatacgaataatttgtacgttatcaatatggttagctgcgatgttgtattgcgcagcagcaaccgacggcttagcgatttcggtggctaatacccgatcaaaattacgcgccagcgctaatgaaaagttaccgttgccgcagtacagctccagtaaatcgccttttgagcctttggttacgtccagcgcccattccagcatctgaatattcatcgccgcgttcggctgggtaaagctgttttctacctgacggtagatcatctctttccctgcgaccggcagacgttcatcgatgtaatcctgatccagctcgattttggttttcgttgcccgaccaatcagatgcacattcagattctgcgcgcgcagtgcatcgcgcagggcctccgcttcctgacgccactcatcatccagcttcttatggtatagcagggaaaccaccgcctgattactcagcgtagtgaggtaatcaatctggaacaacttgtggcgcagaacgggattattacgcacacccgcaatcatcgccgtcatcaactggttgataagttcactggcggcggggaagctatccacgcggatgcggcttttggtttgttgatcgaaaatgatgtgatacaggtcatcgccatcgtgccagatgcggaactccgcgcgcatccggtaatgactgaccggcgagcgaaacacttccggaaccaggtcagaaaacggtgccatcatactttgcaaacgtaccactttttcggctaactgcgcttcatactgttctgttggaaggtgttcgggggtcatgatgtatcctgaaaaattaaagtacgcggcgattgtagggattgctcatcagatgtccagatcttgatgaattcctatttgtgagctacgtctggacagtaacttgttacaacctgtagcatccacttgccggtcctgtgagttaatagggaatccagtgcgaatctggagctgacgcgcagcggtaaggaaaggtgcgatgattgcgttatgcggacactgccattcggtgggaagtcatcatctcttagtatcttagatacccctccaagcccgaagacctgccggccaacgtcgcatctggttctcatcatcgcgtaatattgatgaaacctgcggcatccttcttctattgtggatgctttacaatgattaaaaaagcttcgctgctgacggcgtgttccgtcacggcattttccgcttgggcacaggataccagcccggatactctcgtcgttactgctaaccgttttgaacagccgcgcagcactgtgcttgcaccaaccaccgttgtgacccgtcaggatatcgaccgctggcagtcgacctcggtcaatgatgtgctgcgccgtcttccgggcgtcgatatcacccaaaacggcggttcaggtcagctctcatctatttttattcgcggtacaaatgccagtcatgtgttggtgttaattgatggcgtacgcctgaatctggcgggggtgagtggttctgccgaccttagccagttccctattgcgcttgtccagcgtgttgaatatatccgtgggccgcgctccgctgtttatggttccgatgcaataggcggggtggtgaatatcatcacgacgcgcgatgaacccggaacggaaatttcagcagggtggggaagcaatagttatcagaactatgatgtctctacgcagcaacaactgggggataagacacgggtaacgctgttgggcgattatgcccatactcatggttatgatgttgttgcctatggtaataccggaacgcaagcgcagacagataacgatggttttttaagtaaaacgctttatggcgcgctggagcataactttactgatgcctagagcggctttgtgcgcggctatggctatgataaccgtaccaattatgacgcgtattattctcccggttcaccgttgctcgatacccgtaaactctatagccaaagttgggacgccgggctgcgctataacggcgaactgattaaatcacaactcattaccagctatagccatagcaaagattacaactacgatccccattatggtcgttatgattcgtcggcgacgctcgatgagatgaagcaatacaccgtccagtgggcaaacaatgtcatcgttggtcacggtagtattggtgcgggtgtcgactggcagaaacagactacgacgccgggtacaggttatgttgaggatggatatgatcaacgtaataccggcatctatctgaccgggctgcaacaagtcggcgattttacctttgaaggcgcagcacgcagtgacgataactcacagtttggtcgtcatggaacctggcaaaccagcgccggttgggaattcatcgaaggttatcgcttcattgcttcctacgggacatcttataaggcaccaaatctggggcaactgtatggcttctacggaaatccgaatctggacccggagaaaagcaaacagtgggaaggcgcgtttgaaggcttaaccgctggggtgaactggcgtatttccggatatcgtaacgatgtcagtgacttgatcgattatgatgatcacaccctgaaatattacaacgaagggaaagcgcggattaagggcgtcgaggcgaccgccaattttgataccggaccactgacgcatactgtgagttatgattatgtcgatgcgcgcaatgcgattaccgacacgccgttgttacgccgtgctaaacagcaggtgaaataccagctcgactggcagttgtatgacttcgactggggtattacttatcagtatttaggcactcgctatgataaggattactcatcttatccttatcaaaccgttaaaatgggcggtgtgagcttgtgggatcttgcggttgcgtatccggtcacctctcacctgacagttcgtggtaaaatagccaacctgttcgacaaagattatgagacagtctatggctaccaaactgcaggacgggaatacaccttgtctggcagctacaccttctgaaccacgtcccaccgtgctggtgtttgactccggcgtcggtgggttgtcggtctatgacgagatccggcatctcttaccggatctccattacatttatgctttcgataacgtcgctttcccgtatggcgaaaaaagcgaagcgtttattgttgagcgagtggtggcaattgtcaccgcggtgcaagaacgttatccccttgcgctggctgtggtcgcttgcaacactgccagtaccgtttcacttcctgcattacgcgaaaagttcgacttcccggttgttggtgtcgtgccggcgattaaacctgctgcacgtctgacggcaaatggcattgtcggattactggcaacccgcggaacagttaaacgttcttatactcatgagctgatcgcgcgtttcgctaatgaatgccagatagaaatgctgggctcggcagagatggttgagttggctgaagcgaagctacatggcgaagatgtttctctggatgcactaaaacgtatcctacgcccgtggttaagaatgaaagagccgccagataccgttgtattgggttgcacccatttccctctactacaagaagaactgttacaagtgctgccagagggaacccggctggtggattctggcgcagcgattgctcgccgaacggcctggttgttagaacatgaagccccggatgcaaaatctgccgatgcgaatattgccttttgtatggcaatgacgccaggagctgaacaattattgcccgttttacagcgttacggcttcgaaacgctcgaaaaactggcagttttaggctgatttggttgaatgttgcgcggtcagaaaattattttaaatttcctcttgtcaggccggaataactccctataatgcgccaccactgacacggaacaacggcaaacacgccgccgggtcagcggggttctcctgagaactccggcagagaaagcaaaaataaatgcttgactctgtagcgggaaagcgtattatgcgcaccccgcgccgctgagaaaaagcaaagcggcactgctctttaacaatttatcagacaatctgtgtgggcactcgaagatacggattcttaacgtcgcaagacgaaaaatgaataccaagtctcaagagtgaacacgtaattcattacgaagtttaattctttgagcatcaaacttttaaattgaagagtttgatcatggctcagattgaacgctggcggcaggcctaacacatgcaagtcgaacggtaacaggaagaagcttgcttctttgctgacgagtggcggacgggtgagtaatgtctgggaaactgcctgatggagggggataactactggaaacggtagctaataccgcataacgtcgcaagaccaaagagggggaccttcgggcctcttgccatcggatgtgcccagatgggattagctagtaggtggggtaacggctcacctaggcgacgatccctagctggtctgagaggatgaccagccacactggaactgagacacggtccagactcctacgggaggcagcagtggggaatattgcacaatgggcgcaagcctgatgcagccatgccgcgtgtatgaagaaggccttcgggttgtaaagtactttcagcggggaggaagggagtaaagttaatacctttgctcattgacgttacccgcagaagaagcaccggctaactccgtgccagcagccgcggtaatacggagggtgcaagcgttaatcggaattactgggcgtaaagcgcacgcaggcggtttgttaagtcagatgtgaaatccccgggctcaacctgggaactgcatctgatactggcaagcttgagtctcgtagaggggggtagaattccaggtgtagcggtgaaatgcgtagagatctggaggaataccggtggcgaaggcggccccctggacgaagactgacgctcaggtgcgaaagcgtggggagcaaacaggattagataccctggtagtccacgccgtaaacgatgtcgacttggaggttgtgcccttgaggcgtggcttccggagctaacgcgttaagtcgaccgcctggggagtacggccgcaaggttaaaactcaaatgaattgacgggggcccgcacaagcggtggagcatgtggtttaattcgatgcaacgcgaagaaccttacctggtcttgacatccacggaagttttcagagatgagaatgtgccttcgggaaccgtgagacaggtgctgcatggctgtcgtcagctcgtgttgtgaaatgttgggttaagtcccgcaacgagcgcaacccttatcctttgttgccagcggtccggccgggaactcaaaggagactgccagtgataaactggaggaaggtggggatgacgtcaagtcatcatggcccttacgaccagggctacacacgtgctacaatggcgcatacaaagagaagcgacctcgcgagagcaagcggacctcataaagtgcgtcgtagtccggattggagtctgcaactcgactccatgaagtcggaatcgctagtaatcgtggatcagaatgccacggtgaatacgttcccgggccttgtacacaccgcccgtcacaccatgggagtgggttgcaaaagaagtaggtagcttaaccttcgggagggcgcttaccactttgtgattcatgactggggtgaagtcgtaacaaggtaaccgtaggggaacctgcggttggatcacctccttaccttaaagaagcgtactttgcagtgctcacacagattgtctgatgaaaatgagcagtaaaacctctacaggcttgtagtcaggtttaagcgcacccctgataagggtgaggtcggtggttcaagtccactcaggcctaccaaatttgcacggcaaatttgaagaggttttaactacatgttatggggctatagctcagctgggagagcgcctgctttgcacgcaggaggctgcggttcgatcccgcatagctccaccatctctgtagtggttaaataaaaaatacttcagagtgtacctgcaaaggttcactgcgaagttttgctctttaaaaatctggatcaagctgaaaattgaaacactgaacaatgaaagttgttcgtgagtctctcaaattttcgcaacacgatgatgaatcgtaagaaacatcttcgggttgtgaggttaagcgactaagcgtacacggtggatgccctggcagtcagaggcgatgaaggacgtgctaatctgcgataagcgtcggtaaggtgatatgaaccgttataaccggcgatttccgaatggggaaacccagtgtgtttcgacacactatcattaactgaatccataggttaatgaggcgaaccgggggaactgaaacatctaagtaccccgaggaaaagaaatcaaccgagattcccccagtagcggcgagcgaacggggagcagcccagagcctgaatcagtgtgtgtgttagtggaagcgtctggaaaggcgcgcgatacagggtgacagccccgtacacaaaaatgcacatgctgtgagctcgatgagtagggcgggacacgtggtatcctgtctgaatatggggggaccatcctccaaggctaaatactcctgactgaccgatagtgaaccagtaccgtgagggaaaggcgaaaagaaccccggcgaggggagtgaaaaagaacctgaaaccgtgtacgtacaagcagtgggagcacgcttaggcgtgtgactgcgtaccttttgtataatgggtcagcgacttatattctgtagcaaggttaaccgaataggggagccgaagggaaaccgagtcttaactgggcgttaagttgcagggtatagacccgaaacccggtgatctagccatgggcaggttgaaggttgggtaacactaactggaggaccgaaccgactaatgttgaaaaattagcggatgacttgtggctgggggtgaaaggccaatcaaaccgggagatagctggttctccccgaaagctatttaggtagcgcctcgtgaattcatctccgggggtagagcactgtttcggcaagggggtcatcccgacttaccaacccgatgcaaactgcgaataccggagaatgttatcacgggagacacacggcgggtgctaacgtccgtcgtgaagagggaaacaacccagaccgccagctaaggtcccaaagtcatggttaagtgggaaacgatgtgggaaggcccagacagccaggatgttggcttagaagcagccatcatttaaagaaagcgtaatagctcactggtcgagtcggcctgcgcggaagatgtaacggggctaaaccatgcaccgaagctgcggcagcgacactatgtgttgttgggtaggggagcgttctgtaagcctgtgaaggtgtgctgtgaggcatgctggaggtatcagaagtgcgaatgctgacataagtaacgataaagcgggtgaaaagcccgctcgccggaagaccaagggttcctgtccaacgttaatcggggcagggtgagtcgacccctaaggcgaggccgaaaggcgtagtcgatgggaaacaggttaatattcctgtacttggtgttactgcgaaggggggacggagaaggctatgttggccgggcgacggttgtcccggtttaagcgtgtaggctggttttccaggcaaatccggaaaatcaaggctgaggcgtgatgacgaggcactacggtgctgaagcaacaaatgccctgcttccaggaaaagcctctaagcatcaggtaacatcaaatcgtaccccaaaccgacacaggtggtcaggtagagaataccaaggcgcttgagagaactcgggtgaaggaactaggcaaaatggtgccgtaacttcgggagaaggcacgctgatatgtaggtgaagtccctcgcggatggagctgaaatcagtcgaagataccagctggctgcaactgtttattaaaaacacagcactgtgcaaacacgaaagtggacgtatacggtgtgacgcctgcccggtgccggaaggttaattgatggggttagcgcaagcgaagctcttgatcgaagccccggtaaacggcggccgtaactataacggtcctaaggtagcgaaattccttgtcgggtaagttccgacctgcacgaatggcgtaatgatggccaggctgtctccacccgagactcagtgaaattgaactcgctgtgaagatgcagtgtacccgcggcaagacggaaagaccccgtgaacctttactatagcttgacactgaacattgagccttgatgtgtaggataggtgggaggcttagaagtgtggacgccagtctgcatggagccgaccttgaaataccaccctttaatgtttgatgttctaacgttgacccgtaatccgggttgcggacagtgtctggtgggtagtttgactggggcggtctcctcctaaagagtaacggaggagcacgaaggttggctaatcctggtcggacatcaggaggttagtgcaatggcataagccagcttgactgcgagcgtgacggcgcgagcaggtgcgaaagcaggtcatagtgatccggtggttctgaatggaagggccatcgctcaacggataaaaggtactccggggataacaggctgataccgcccaagagttcatatcgacggcggtgtttggcacctcgatgtcggctcatcacatcctggggctgaagtaggtcccaagggtatggctgttcgccatttaaagtggtacgcgagctgggtttagaacgtcgtgagacagttcggtccctatctgccgtgggcgctggagaactgaggggggctgctcctagtacgagaggaccggagtggacgcatcactggtgttcgggttgtcatgccaatggcactgcccggtagctaaatgcggaagagataagtgctgaaagcatctaagcacgaaacttgccccgagatgagttctccctgaccctttaagggtcctgaaggaacgttgaagacgacgacgttgataggccgggtgtgtaagcgcagcgatgcgttgagctaaccggtactaatgaaccgtgaggcttaaccttacaacgccgaagctgttttggcggatgagagaagattttcagcctgatacagattaaatcagaacgcagaagcggtctgataaaacagaatttgcctggcggcagtagcgcggtggtcccacctgaccccatgccgaactcagaagtgaaacgccgtagcgccgatggtagtgtggggtctccccatgcgagagtagggaactgccaggcatcaaataaaacgaaaggctcagtcgaaagactgggcctttcgttttatctgttgtttgtcggtgaacgctctcctgagtaggacaaatccgccgggagcggatttgaacgttgcgaagcaacggcccggagggtggcgggcaggacgcccgccataaactgccaggcatcaaattaagcagaaggccatcctgacggatggcctttttgcgtttctacaaactcttcctgtcgtcatatctacaagccatccccccacagatacggtaaactagcctcgtttttgcatcaggaaagcagctatgaaccactccttaaaaccctggaacacatttggcattgatcataatgctcagcacattgtatgtgccgaagacgaacaacaattactcaatgcctggcagtatgcaaccgcagaaggacaacccgttcttattctgggtgaaggaagtaatgtactttttctggaggactatcgcggcacggtgatcatcaaccggatcaaaggtatcgaaattcatgatgaacctgatgcgtggtatttacatgtaggagccggagaaaactggcatcgtctggtaaaatacactttgcaggaaggtatgcctggtctggaaaatctggcattaattcctggttgtgtcggctcatcacctatccagaatattggtgcttatggcgtagaattacagcgagtttgcgcttatgttgattctgttgaactggcgacaggcaagcaagtgcgcttaactgccaaagagtgccgttttggctatcgcgacagtatttttaaacatgaataccaggaccgcttcgctattgtagccgtaggtctgcgtctgccaaaagagtggcaacctgtactaacgtatggtgacttaactcgtctggatcctacaacagtaacgccacagcaagtatttaatgcggtgtgtcatatgcgcaccaccaaactccctgatccaaaagtgaatggcaatgccggtagtttcttcaaaaaccctgttgtatctgccgaaacggctaaagcattactgtcacaatttccaacagcaccaaattacccccaggcggatggttcagtaaaactggcagcaggttggcttatcgatcagtgccagctaaaagggatgcaaataggtggggctgcggtgcaccgtcaacaggcgttagttctcattaatgaagacaatgcaaaaagcgaagatgttgtacagctggcgcatcatgtaagacagaaagttggtgaaaaatttaatgtctggcttgagcctgaagtccgctttattggtgcatcaggtgaagtgagcgcagtggagacaatttcatgaaggataacaccgtgccactgaaattgattgccctgttagcgaacggtgaatttcactctggcgagcagttgggtgaaacgctgggaatgagccgggcggctattaataaacacattcagacactgcgtgactggggcgttgatgtctttaccgttccgggtaaaggatacagcctgcctgagcctatccagttacttaatgctaaacagatattgggtcagctggatggcggtagtgtagccgtgctgccagtgattgactccacgaatcagtaccttcttgatcgtatcggagagcttaaatcgggcgatgcttgcattgcagaataccagcaggctggccgtggtcgccggggtcggaaatggttttcgccttttggcgcaaacttatatttgtcgatgttctggcgtctggaacaaggcccggcggcggcgattggtttaagtctggttatcggtatcgtgatggcggaagtattacgcaagctgggtgcagataaagttcgtgttaaatggcctaatgacctctatctgcaggatcgcaagctggcaggcattcttgtggagctgactggcaaaactggcgatgcggcgcaaatagtcattggagccgggatcaacatggcaatgcgccgtgttgaagagagtgtcgttaatcaggggtggatcacgctgcaggaagcggggatcaatctcgatcgtaatacgttggcggccatgctaatacgtgaattacgtgctgcgttggaactcttcgaacaagaaggattggcaccttatctgtcgcgctgggaaaagctggataattttattaatcgcccagtgaaacttatcattggtgataaagaaatatttggcatttcacgcggaatagacaaacagggggctttattacttgagcaggatggaataataaaaccctggatgggcggtgaaatatccctgcgtagtgcagaaaaataagaaaggggagtattcgctcccctgcaaattatttgcgtagtctgacctcttctaccgcatgattagcacttttcgtcaggattaaactggcgcgctcacgagtaggtagaatattttgctttaagttcagccagttgatctctttccacaatgtcatggcagtcttaatcgcttcttctttagttaatttcgcgtagttatgaaaataggaatccgggtcggtaaaagccccttcgcggaatttcagaaaacggttgatataccatgtctgaagtaagtcttccggtgcatcaacatatatcgaaaaatcgacaaaatcagaaacaaatacatgatgtggatcgtgtggataatccatcccgctctgtaagacatttaacccttcaagaattaaaatatcaggctgaacaaccgttttatctccatccgggatcacatcataaataagatgtgagtaaacaggtgctgtaacgtttggcacgccggatttgagatcggaaacaaacttcaccaggcgatgcatatcatacgattccgggaagcctttcttcttcatcagaccacgttctttcagaacctgattagggtgaaggaagccatctgtagtgatcagttcaacacgacgatgttccggccaacggcttaatagcgcctgcaatacacgggcggttgtacttttccccaccgcgacactgccagcaatactgataatgtaaggaatgcgttgcccgttggtaccaagaaactgttccagaactgcctgacggcgcagattcgagcttatatagaagttcagcaaacgtgacaaaggtaaatagatctcggcaacttcttctaacgagagatcttcattaatacctttgagacgggcgatctcatcttccgataacgtcataggtacggaatcacgcagagctgcccactggttgcggtcaaactgtaggtaaggcgtcattaacgtttgctcttttatactcataagcatgtttctggcggtcatagctctatcggcaaagcgatatttgccatggcgcgtcacagttctgttgaatgggttaatgggcaggagggtaacaccagatggggaggaataataagaaaaaatctctgccaggaagctatcgttgaaaagcaatgtgacagatattccatctgataaaaagaattatggtttagcaggagcgcattgttgagcacaatgatgttgaaaaagtgtgctaatctgccctccgttcggctgtttcttcatcgtgtcgcataaaatgtgaccaataaaacaaattatgcaattttttagttgcatgaactcgcatgtctccatagaatgcgcgctacttgatgccgacttagctcagtaggtagagcaactgacttgtaatcagtaggtcaccagttcgattccggtagtcggcaccatcaagtccggtggggttcccgagcggccaaagggagcagactgtaaatctgccgtcacagacttcgaaggttcgaatccttcccccaccaccaatttcggccacgcgatggcgtagcccgagacgataagttcgcttaccggctcgaataaagagagcttctctcgatattcagtgcagaatgaaaatcaggtagccgagttccaggatgcgggcatcgtataatggctattacctcagccttccaagctgatgatgcgggttcgattcccgctgcccgctccaagatgtgctgatatagctcagttggtagagcgcacccttggtaagggtgaggtcggcagttcgaatctgcctatcagcaccacttcttttctcctccctgttttttccttctgtttattgcattcaacaagtcgggcatgttgcctggttgatgtggtgatatcaccgatttatccgtgtcttagagggacaatcgatgtctaaagaaaagtttgaacgtacaaaaccgcacgttaacgtcggtactatcggccacgttgaccatggtaaaacaacgctgaccgctgcaatcactaccgtactggctaaaacctacggcggtgctgctcgcgcattcgaccagatcgataacgcgccggaagaaaaagctcgtggtatcaccatcaacacttctcacgttgaatacgacaccccgacccgtcactacgcacacgtagactgcccggggcacgccgactatgttaaaaacatgatcaccggtgctgcgcagatggacggcgcgatcctggtagttgctgcgactgacggcccgatgccgcagactcgtgagcacatcctgctgggtcgtcaggtaggcgttccgtacatcatcgtgttcctgaacaaatgcgacatggttgatgacgaagagctgctggaactggttgaaatggaagttcgtgaacttctgtctcagtacgacttcccgggcgacgacactccgatcgttcgtggttctgctctgaaagcgctggaaggcgacgcagagtgggaagcgaaaatcctggaactggctggcttcctggattcttacattccggaaccagagcgtgcgattgacaagccgttcctgctgccgatcgaagacgtattctccatctccggtcgtggtaccgttgttaccggtcgtgtagaacgcggtatcatcaaagttggtgaagaagttgaaatcgttggtatcaaagagactcagaagtctacctgtactggcgttgaaatgttccgcaaactgctggacgaaggccgtgctggtgagaacgtaggtgttctgctgcgtggtatcaaacgtgaagaaatcgaacgtggtcaggtactggctaagccgggcaccatcaagccgcacaccaagttcgaatctgaagtgtacattctgtccaaagatgaaggcggccgtcatactccgttcttcaaaggctaccgtccgcagttctacttccgtactactgacgtgactggtaccatcgaactgccggaaggcgtagagatggtaatgccgggcgacaacatcaaaatggttgttaccctgatccacccgatcgcgatggacgacggtctgcgtttcgcaatccgtgaaggcggccgtaccgttggcgcgggcgttgtagcaaaagttctgagctaattgccgataacatttgacgcaatgcgcactaaaagggcatcatttgatgccctttttgcacgctttcgtaccagaacctggctcatcagtgattttctttgtcataatcattgctgagacaggctctgttgagggcgtataatccgaaaagctaatacgcgtttcgatttggtttgcctcgcgatcgcggggtgaaaatgtttgtagaaaacttctgacaggttggtttatgagtgcgaataccgaagctcaaggaagcgggcgcggcctggaagcgatgaagtgggtcgttgtggtggcattgctcctggtggcgattgtcggcaactatctttatcgcgacattatgctgccgctgcgtgcgctggccgtagtaattctgattgctgcagcgggtggtgtcgcgctgttaacgacaaaaggtaaagctaccgttgcttttgcccgtgaagcgcgtaccgaagtccgtaaggtcatttggccgactcgccaggaaacattgcacaccacgctgattgtggctgcggttaccgcagtaatgtcactgatcctgtggggactggatggtattctggttcgcctggtatcctttatcactggcctgaggttctgagatgtctgaagctcctaaaaagcgctggtacgtcgttcaggcgttttccggttttgaaggccgcgtagcaacgtcgctgcgtgagcatatcaaattacacaacatggaagatttgtttggtgaagtcatggtaccaaccgaagaagtggttgaaatccgtggcggtcagcgtcgcaaaagcgaacgtaaattcttccctggctacgtcctcgttcagatggtgatgaacgacgcgagctggcacctggtgcgcagcgtaccgcgtgtgatgggcttcatcggcggtacttccgatcgtcctgcgccaatcagcgataaagaagtcgatgcgattatgaaccgcctgcagcaggttggtgataagccgcgtccgaaaacgctgtttgaaccgggtgaaatggtccgtgttaatgatggtccgttcgctgacttcaacggtgttgttgaagaagtggattacgagaaatctcgtctgaaagtgtctgtttctatcttcggtcgtgcgaccccggtagagctggacttcagccaggttgaaaaagcctaacccagcgatcaaaaaagcggcgatttaatcgttgcacaaggcgtgagattggaatacaatttcgcgccttttgtttttatgggccttgcccgtaaaacgattttttatatcacggggagcctctcagaggcgttattacccaacttgaggaatttataatggctaagaaagtacaagcctatgtcaagctgcaggttgcagctggtatggctaacccgagtccgccagtaggtccggctctgggtcagcagggcgtaaacatcatggaattctgcaaagcgttcaacgcaaaaactgattccatcgaaaaaggtctgccgattccggtagtaatcaccgtttacgctgaccgttctttcactttcgttaccaagaccccgccggcagcagttctgctgaaaaaagcggctggtatcaagtctggttccggtaagccgaacaaagacaaagtgggtaaaatttcccgcgctcagctgcaggaaatcgcgcagaccaaagctgccgacatgactggtgccgacattgaagcgatgactcgctccatcgaaggtactgcacgttccatgggcctggtagtggaggactaagaaatggctaaactgaccaagcgcatgcgtgttatccgcgagaaagttgatgcaaccaaacagtacgacatcaacgaagctatcgcactgctgaaagagctggcgactgctaaattcgtagaaagcgtggacgtagctgttaacctcggcatcgacgctcgtaaatctgaccagaacgtacgtggtgcaactgtactgccgcacggtactggccgttccgttcgcgtagccgtatttacccaaggtgcaaacgctgaagctgctaaagctgcaggcgcagaactggtaggtatggaagatctggctgaccagatcaagaaaggcgaaatgaactttgacgttgttattgcttctccggatgcaatgcgcgttgttggccagctgggccaggttctgggtccgcgcggcctgatgccaaacccgaaagtgggtactgtaacaccgaacgttgctgaagcggttaaaaacgctaaagctggccaggttcgttaccgtaacgacaaaaacggcatcatccacaccaccatcggtaaagtggactttgacgctgacaaactgaaagaaaacctggaagctctgctggttgcgctgaaaaaagcaaaaccgactcaggcgaaaggcgtgtacatcaagaaagttagcatctccaccaccatgggtgcaggtgttgcagttgaccaggctggcctgagcgcttctgtaaactaatgcctttacgtgggcggtgattttgtctacaatcttacccccacgtataatgcttaatgcagacgtatatccgagatattcgggttgtggcaaggcggcaactgagtgagtcgccaggagcatagctaactatgtgactggtgcgaatgaaggaagccaacgccgtcacaagctgaatagcgacggatagaaaagatttgttcgttggagcctggcctatccaggcctccgtcgaagaccgcaggagtttcgcaagaaacttaatcccctgcgtagacggtgacagaacgctaagattattcttttatattctggcttgtttctgctcaccgtaattaagacgctctctccgtttggaggagtgaagtgagttccagagattttctctggcaaacatccaggagcaaagctaatggctttaaatcttcaagacaaacaagcgattgttgctgaagtcagcgaagtagccaaaggcgcgctgtctgcagtagttgcggattcccgtggcgtaactgtagataaaatgactgaactgcgtaaagcaggtcgcgaagctggcgtatacatgcgtgttgttcgtaacaccctgctgcgccgtgctgttgaaggtactccgttcgagtgcctgaaagacgcgtttgttggtccgaccctgattgcatactctatggaacacccgggcgctgctgctcgtctgttcaaagagttcgcgaaagcgaatgcaaaatttgaggtcaaagccgctgcctttgaaggtgagctgatcccggcgtctcagatcgaccgcctggcaactctgccgacctacgaagaagcaattgcacgcctgatggcaaccatgaaagaagcttcggctggcaaactggttcgtactctggctgctgtacgcgatgcgaaagaagctgcttaatcgcagttatctttttaacgcattcgcttacgtataaacttattctgatattcaggaacaatttaaatgtctatcactaaagatcaaatcattgaagcagttgcagctatgtctgtaatggacgttgtagaactgatctctgcaatggaagaaaaattcggtgtttccgctgctgctgctgtagctgtagctgctggcccggttgaagctgctgaagaaaaaactgaattcgacgtaattctgaaagctgctggcgctaacaaagttgctgttatcaaagcagtacgtggcgcaactggcctgggtctgaaagaagctaaagacctggtagaatctgcaccggctgctctgaaagaaggcgtgagcaaagacgacgcagaagcactgaaaaaagctctggaagaagctggcgctgaagttgaagttaaataagccaacccttccggttgcagcctgagaaatcaggctgatggctggtgactttttagtcaccagcctttttgcgctgtaaggcgccagtagcgtttcacactgtttgactactgctgtgcctttcaatgcttgtttctatcgacgacttaatatactgcgacaggacgtccgttctgtgtaaatcgcaatgaaatggtttaagcgtgatagcaacaggcattgcggaaagtgttccattttccggtcaacaaaatagtgttgcacaaactgtccgctcaatggacagatgggtcgacttgtcagcgagctgaggaaccctatggtttactcctataccgagaaaaaacgtattcgtaaggattttggtaaacgtccacaagttctggatgtaccttatctcctttctatccagcttgactcgtttcagaaatttatcgagcaagatcctgaagggcagtatggtctggaagctgctttccgttccgtattcccgattcagagctacagcggtaattccgagctgcaatacgtcagctaccgccttggcgaaccggtgtttgacgtccaggaatgtcaaatccgtggcgtgacctattccgcaccgctgcgcgttaaactgcgtctggtgatctatgagcgcgaagcgccggaaggcaccgtaaaagacattaaagaacaagaagtctacatgggcgaaattccgctcatgacagacaacggtacctttgttatcaacggtactgagcgtgttatcgtttcccagctgcaccgtagtccgggcgtcttctttgactccgacaaaggtaaaacccactcttcgggtaaagtgctgtataacgcgcgtatcatcccttaccgtggttcctggctggacttcgaattcgatccgaaggacaacctgttcgtacgtatcgaccgtcgccgtaaactgcctgcgaccatcattctgcgcgccctgaactacaccacagagcagatcctcgacctgttctttgaaaaagttatctttgaaatccgtgataacaagctgcagatggaactggtgccggaacgcctgcgtggtgaaaccgcatcttttgacatcgaagctaacggtaaagtgtacgtagaaaaaggccgccgtatcactgcgcgccacattcgccagctggaaaaagacgacgtcaaactgatcgaagtcccggttgagtacatcgcaggtaaagtggttgctaaagactatattgatgagtctaccggcgagctgatctgcgcagcgaacatggagctgagcctggatctgctggctaagctgagccagtctggtcacaagcgtatcgaaacgctgttcaccaacgatctggatcacggcccatatatctctgaaaccttacgtgtcgacccaactaacgaccgtctgagcgcactggtagaaatctaccgcatgatgcgccctggcgagccgccgactcgtgaagcagctgaaagcctgttcgagaacctgttcttctccgaagaccgttatgacttgtctgcggttggtcgtatgaagttcaaccgttctctgctgcgcgaagaaatcgaaggttccggtatcctgagcaaagacgacatcattgatgttatgaaaaagctcatcgatatccgtaacggtaaaggcgaagtcgatgatatcgaccacctcggcaaccgtcgtatccgttccgttggcgaaatggcggaaaaccagttccgcgttggcctggtacgtgtagagcgtgcggtgaaagagcgtctgtctctgggcgatctggataccctgatgccacaggatatgatcaacgccaagccgatttccgcagcagtgaaagagttcttcggttccagccagctgtctcagtttatggaccagaacaacccgctgtctgagattacgcacaaacgtcgtatctccgcactcggcccaggcggtctgacccgtgaacgtgcaggcttcgaagttcgagacgtacacccgactcactacggtcgcgtatgtccaatcgaaacccctgaaggtccgaacatcggtctgatcaactctctgtccgtgtacgcacagactaacgaatacggcttccttgagactccgtatcgtaaagtgaccgacggtgttgtaactgacgaaattcactacctgtctgctatcgaagaaggcaactacgttatcgcccaggcgaactccaacttggatgaagaaggccacttcgtagaagacctggtaacttgccgtagcaaaggcgaatccagcttgttcagccgcgaccaggttgactacatggacgtatccacccagcaggtggtatccgtcggtgcgtccctgatcccgttcctggaacacgatgacgccaaccgtgcattgatgggtgcgaacatgcaacgtcaggccgttccgactctgcgcgctgataagccgctggttggtactggtatggaacgtgctgttgccgttgactccggtgtaactgcggtagctaaacgtggtggtgtcgttcagtacgtggatgcttcccgtatcgttatcaaagttaacgaagacgagatgtatccgggtgaagcaggtatcgacatctacaacctgaccaaatacacccgttctaaccagaacacctgtatcaaccagatgccgtgtgtgtctctgggtgaaccggttgaacgtggcgacgtgctggcagacggtccgtccaccgacctcggtgaactggcgcttggtcagaacatgcgcgtagcgttcatgccgtggaatggttacaacttcgaagactccatcctcgtatccgagcgtgttgttcaggaagaccgtttcaccaccatccacattcaggaactggcgtgtgtgtcccgtgacaccaagctgggtccggaagagatcaccgctgacatcccgaacgtgggtgaagctgcgctctccaaactggatgaatccggtatcgtttacattggtgcggaagtgaccggtggcgacattctggttggtaaggtaacgccgaaaggtgaaactcagctgaccccagaagaaaaactgctgcgtgcgatcttcggtgagaaagcctctgacgttaaagactcttctctgcgcgtaccaaacggtgtatccggtacggttatcgacgttcaggtctttactcgcgatggcgtagaaaaagacaaacgtgcgctggaaatcgaagaaatgcagctcaaacaggcgaagaaagacctgtctgaagaactgcagatcctcgaagcgggtctgttcagccgtatccgtgctgtgctggtagccggtggcgttgaagctgagaagctcgacaaactgccgcgcgatcgctggctggagctgggcctgacagacgaagagaaacaaaatcagctggaacagctggctgagcagtatgacgaactgaaacacgagttcgagaagaaactcgaagcgaaacgccgcaaaatcacccagggcgacgatctggcaccgggcgtgctgaagattgttaaggtatatctggcggttaaacgccgtatccagcctggtgacaagatggcaggtcgtcacggtaacaagggtgtaatttctaagatcaacccgatcgaagatatgccttacgatgaaaacggtacgccggtagacatcgtactgaacccgctgggcgtaccgtctcgtatgaacatcggtcagatcctcgaaacccacctgggtatggctgcgaaaggtatcggcgacaagatcaacgccatgctgaaacagcagcaagaagtcgcgaaactgcgcgaattcatccagcgtgcgtacgatctgggcgctgacgttcgtcagaaagttgacctgagtaccttcagcgatgaagaagttatgcgtctggctgaaaacctgcgcaaaggtatgccaatcgcaacgccggtgttcgacggtgcgaaagaagcagaaattaaagagctgctgaaacttggcgacctgccgacttccggtcagatccgcctgtacgatggtcgcactggtgaacagttcgagcgtccggtaaccgttggttacatgtacatgctgaaactgaaccacctggtcgacgacaagatgcacgcgcgttccaccggttcttacagcctggttactcagcagccgctgggtggtaaggcacagttcggtggtcagcgtttcggggagatggaagtgtgggcgctggaagcatacggcgcagcatacaccctgcaggaaatgctcaccgttaagtctgatgacgtgaacggtcgtaccaagatgtataaaaacatcgtggacggcaaccatcagatggagccgggcatgccagaatccttcaacgtattgttgaaagagattcgttcgctgggtatcaacatcgaactggaagacgagtaattctcgctcaaacaggtcactgctgtcgggttaaaacccggcagcggattgtgctaactccgacgggagcaaatccgtgaaagatttattaaagtttctgaaagcgcagactaaaaccgaagagtttgatgcgatcaaaattgctctggcttcgccagacatgatccgttcatggtctttcggtgaagttaaaaagccggaaaccatcaactaccgtacgttcaaaccagaacgtgacggccttttctgcgcccgtatctttgggccggtaaaagattacgagtgcctgtgtggtaagtacaagcgcctgaaacaccgtggcgtcatctgtgagaagtgcggcgttgaagtgacccagactaaagtacgccgtgagcgtatgggccacatcgaactggcttccccgactgcgcacatctggttcctgaaatcgctgccgtcccgtatcggtctgctgctcgatatgccgctgcgcgatatcgaacgcgtactgtactttgaatcctatgtggttatcgaaggcggtatgaccaacctggaacgtcagcagatcctgactgaagagcagtatctggacgcgctggaagagttcggtgacgaattcgacgcgaagatgggggcggaagcaatccaggctctgctgaagagcatggatctggagcaagagtgcgaacagctgcgtgaagagctgaacgaaaccaactccgaaaccaagcgtaaaaagctgaccaagcgtatcaaactgctggaagcgttcgttcagtctggtaacaaaccagagtggatgatcctgaccgttctgccggtactgccgccagatctgcgtccgctggttccgctggatggtggtcgtttcgcgacttctgacctgaacgatctgtatcgtcgcgtcattaaccgtaacaaccgtctgaaacgtctgctggatctggctgcgccggacatcatcgtacgtaacgaaaaacgtatgctgcaggaagcggtagacgccctgctggataacggtcgtcgcggtcgtgcgatcaccggttctaacaagcgtcctctgaaatctttggccgacatgatcaaaggtaaacagggtcgtttccgtcagaacctgctcggtaagcgtgttgactactccggtcgttctgtaatcaccgtaggtccatacctgcgtctgcatcagtgcggtctgccgaagaaaatggcactggagctgttcaaaccgttcatctacggcaagctggaactgcgtggtcttgctaccaccattaaagctgcgaagaaaatggttgagcgcgaagaagctgtcgtttgggatatcctggacgaagttatccgcgaacacccggtactgctgaaccgtgcaccgactctgcaccgtctgggtatccaggcatttgaaccggtactgatcgaaggtaaagctatccagctgcacccgctggtttgtgcggcatataacgccgacttcgatggtgaccagatggctgttcacgtaccgctgacgctggaagcccagctggaagcgcgtgcgctgatgatgtctaccaacaacatcctgtccccggcgaacggcgaaccaatcatcgttccgtctcaggacgttgtactgggtctgtactacatgacccgtgactgtgttaacgccaaaggcgaaggcatggtgctgactggcccgaaagaagcagaacgtctgtatcgctctggtctggcttctctgcatgcgcgcgttaaagtgcgtatcaccgagtatgaaaaagatgctaacggtgaattagtagcgaaaaccagcctgaaagacacgactgttggccgtgccattctgtggatgattgtaccgaaaggtctgccttactccatcgtcaaccaggcgctgggtaaaaaagcaatctccaaaatgctgaacacctgctaccgcattctcggtctgaaaccgaccgttatttttgcggaccagatcatgtacaccggcttcgcctatgcagcgcgttctggtgcatctgttggtatcgatgacatggtcatcccggagaagaaacacgaaatcatctccgaggcagaagcagaagttgctgaaattcaggagcagttccagtctggtctggtaactgcgggcgaacgctacaacaaagttatcgatatctgggctgcggcgaacgatcgtgtatccaaagcgatgatggataacctgcaaactgaaaccgtgattaaccgtgacggtcaggaagagaagcaggtttccttcaacagcatctacatgatggccgactccggtgcgcgtggttctgcggcacagattcgtcagcttgctggtatgcgtggtctgatggcgaagccggatggctccatcatcgaaacgccaatcaccgcgaacttccgtgaaggtctgaacgtactccagtacttcatctccacccacggtgctcgtaaaggtctggcggataccgcactgaaaactgcgaactccggttacctgactcgtcgtctggttgacgtggcgcaggacctggtggttaccgaagacgattgtggtacccatgaaggtatcatgatgactccggttatcgagggtggtgacgttaaagagccgctgcgcgatcgcgtactgggtcgtgtaactgctgaagacgttctgaagccgggtactgctgatatcctcgttccgcgcaacacgctgctgcacgaacagtggtgtgacctgctggaagagaactctgtcgacgcggttaaagtacgttctgttgtatcttgtgacaccgactttggtgtatgtgcgcactgctacggtcgtgacctggcgcgtggccacatcatcaacaagggtgaagcaatcggtgttatcgcggcacagtccatcggtgaaccgggtacacagctgaccatgcgtacgttccacatcggtggtgcggcatctcgtgcggctgctgaatccagcatccaagtgaaaaacaaaggtagcatcaagctcagcaacgtgaagtcggttgtgaactccagcggtaaactggttatcacttcccgtaatactgaactgaaactgatcgacgaattcggtcgtactaaagaaagctacaaagtaccttacggtgcggtactggcgaaaggcgatggcgaacaggttgctggcggcgaaaccgttgcaaactgggacccgcacaccatgccggttatcaccgaagtaagcggttttgtacgctttactgacatgatcgacggccagaccattacgcgtcagaccgacgaactgaccggtctgtcttcgctggtggttctggattccgcagaacgtaccgcaggtggtaaagatctgcgtccggcactgaaaatcgttgatgctcagggtaacgacgttctgatcccaggtaccgatatgccagcgcagtacttcctgccgggtaaagcgattgttcagctggaagatggcgtacagatcagctctggtgacaccctggcgcgtattccgcaggaatccggcggtaccaaggacatcaccggtggtctgccgcgcgttgcggacctgttcgaagcacgtcgtccgaaagagccggcaatcctggctgaaatcagcggtatcgtttccttcggtaaagaaaccaaaggtaaacgtcgtctggttatcaccccggtagacggtagcgatccgtacgaagagatgattccgaaatggcgtcagctcaacgtgttcgaaggtgaacgtgtagaacgtggtgacgtaatttccgacggtccggaagcgccgcacgacattctgcgtctgcgtggtgttcatgctgttactcgttacatcgttaacgaagtacaggacgtataccgtctgcagggcgttaagattaacgataaacacatcgaagttatcgttcgtcagatgctgcgtaaagctaccatcgttaacgcgggtagctccgacttcctggaaggcgaacaggttgaatactctcgcgtcaagatcgcaaaccgcgaactggaagcgaacggcaaagtgggtgcaacttactcccgcgatctgctgggtatcaccaaagcgtctctggcaaccgagtccttcatctccgcggcatcgttccaggagaccactcgcgtgctgaccgaagcagccgttgcgggcaaacgcgacgaactgcgcggcctgaaagagaacgttatcgtgggtcgtctgatcccggcaggtaccggttacgcgtaccaccaggatcgtatgcgtcgccgtgctgcgggtgaagctccggctgcaccgcaggtgactgcagaagacgcatctgccagcctggcagaactgctgaacgcaggtctgggcggttctgataacgagtaatcgttaatccgcaaataacgtaaaaacccgcttcggcgggtttttttatggggggagtttagggaaagagcatttgtcagaatatttaaggaatttctgaatactcataatcaatgtagagatgactaatatcctgaaactgactgaactaattgagtcaaactcggcaaggattcgatactattcctgtgtaactttcttaaggaacgagaatgaaacaggaagtggaaaagtggcgaccttttggacatccggatggtgatattcgtgatttatcatttcttgatgctcatcaggctgtctacgttcagcatcatgagggcaaagagcctttagagtatcgcttttgggttacctactctcttcactgcttcacaaaagattatgaacatcagacgaacgaagaaaaacaatcgttaatgtaccacgcgcctaaagaatctcgtcccttctgccagcaccgttataacttagcgcgcacacacttaaaaagaactattttggcgctgccagaaagcaacgttattcatgccgggtatggtagctatgccgtgattgaggtggacttagacggaggagataaggcattttactttgttgcgttcagggctttcagggaaaagaaaaaactccgtttgcatgtaactagcgcttatcccatttctgaaaaacagaaaggtaaatcagtgaaatttttcaccattgcctacaacttattgagaaataagcagcttcctcagccctcaaaataacaaaacccaccttaaggtgggtttcgccagagaattatctctggtattcagaacgccattaccggactttgccttgaccttgcgataatcgcaggttgcgggatgtctgaatttcttcagtctgctgcatcctggaagatgagaacatgtgttcttattttcgtctctatcatagttgagtatttactctcttacaatcagatctctttcattgctcaacaggcgatggcttcagactttgcattacggaatttttaagaaaggcagggcgaaacgaggaagaagcttttcgccctggacaacattcctgctgacggcactaccataaaaaaacacaacgctttcaacaaccttgcgtttttcatcttccgtagcggctcggaataaatttacgttcttacattccgtctcatagtctttgcgaggcgcgtcccagatagctgtcccagtctttccataccggctgcaaaccctgagcggttaacgcggcagcaaccgcttccggtctgcgatcgtcgtgcggtgagaactgttccaactcggggtgattatcggcatagccacctggctgcgttttcgagaaggcgctgacgttattgatcgccagcggaataacgcgatcgcgaaaccacggtgattcccgcgtggagagtgacagttcaatctccggtgcaagcagtcggaaggcgcagatggtttgcactaactggcgttcatccataatcgacgcaggctcaatgccgccagtacacgggcgcaggcgcggaaaggagacagagtaacggctttgccagtaatgctgttgcagccatagcaaatgttcggcaaccatatagctgtcaacgcgccagttgtcggaaaggccaattagcgcgccgaggcctatcttatcaatccccgcacgccccagccgatccggcgtttccagccgccagaagaagtcctgttttttgcctttcagatgatggcgggcataagtcgcctcgtgatatgtctcctgataaaccatcacgccatccagaccaagttgctttaactcggcgtattccgtctccgccagcggttgcacttccatctgtagtgaagagaactgttcacgaagggcagggagatgacgacgaaagtaatccatccccactttcgcctgatgttcaccagtgactaacagcagatgttcaaagcccatctcccgtatagcggcactttccctggcaatatccgcttcatccagcgttttgcgcttgatgcgattactcatggaaaatccacagtacgtgcagtcgttagcgcaaagattggaaagataaagcgggacgtagaaactaactgtgttgccaaatcgctgacgggtcagacgctgcgcccgttgggccagttgttccagatagccactggcggcaggcgataacagcgccatcatgtcgtcgcgggtgagttgcgaggcatttagcgcccgctctacgtcagcagccgttttgccgttgatacgcaggcggatgtcgtcccagtccagttgtcgccagcgatcgctgaaggttttcatgccgatgcctccagaaatccggtcagcgggctggtggcatgagcaaaataactgcggctgcccggtccggactgacgtgccagtaggcctgcttctaccgccagacgaaatgccttcgccatgttgacgggatcgtccgcgacggcaatcgccgtattcactaacaccgcgtcggcccccatttccagcgcctgcgcggcatggctgggaacgccgatgccagcatcgacaaccaccggcactgtggcctgctggataataatctccagcatggcgcgggtttccagtccctgattcgagccaatcggcgcgccgagcggcatcaccgctgcacagccgacttcttccagacgtttacacaataccggatcggccccgcagtaaggcagcacgacaaatccctgttgtaccagcgtttcggcggctttcagggtttcgatgggatcgggcaacagccagcgggcgtcagggtgaatctctaattttaaccagtttgtgcctaacgcttcacgagccagatgggcggcgaaaatggcttcttccgctgttttcgccccggatgtatttggcagcagggtcacacccgccgcgataagcggttcgaggatagcgtcgttgtgctggcgcaagtcgacacgtttcatcgccagtgtcaccagctggctgccggaagcgcggatcgcctccaccatcagttgtgaagaagcgaatttccctgtgccggtaaacagatgtgaatcaaacgttttgtccgcaatacgtaacatttcaaccccctgcaataacctgaaaaagcaggatctggtcgccatcctgcacgatatgttgcgcccactgctcacgcgggacgatttgctgattaatcgccagagccgcgcccgcttgtcgttggtcgagttgctccagtagttcgtgaacagtttgcccggcggcgcactgcatcgcttgatcgttaaacaggatctgcattgcttcctccgcataccgggcaaccactggcgcggcgcaacgccaggctgcgccactggctcgatttaccgtcgaacagtcggagttctcccgcaggtgtctctataccgcttaataacttaatggcttccagtgcctgcaaagtgcccataaccccgaccaccgggccaaccacgcccgccgtgcggcagttgcgttctggctcctggttatctggccacaggcagcggtaacacccctgctcccagggcggcgtcagtaccatcaactgaccgccaaatccgaccgcgctggcggtgataagcggcgtgttgagtgccacgcaggcggcattaatctcctggcgagtcgccatattgtcggtacagtcgagcaccacatcggcccgtgcaaccgcatcttttaacgcctcacccgttaaccgttgttgtaatgctgtcagttgaatgtcgggattcaactgtgtcagtcgctgttggctgacctgcgatttcgggcgatcgatatcttcagtggtaaagaggatttgtcgttgcagattgcttaaatgcacatcgtcgtcatctgccagtaccagcgtcccgacgccagcgcccgccaggtacagcgcagcaggtgtacccagcccgcccagaccgataatcagcacctggctgtcgagcagtttttgctgcccgtccagagcgatatcgtcgagcaggatttggcggctataacgcataaagtcacggtcattcatcgccaactcctgcaatttccagcaactgtgccgttgccaaacgccagtctgcggcttgagtaatggcgctgacgacggcgatactgccgacacccgttgctatcaccgcaggcgcgcgtgccagactgataccgccaatcgccacggtgggataatccgccagtcgctcaacatgccgtgccagctgttccagcccctgcggtgcagaaggcatctgtttggtttgcgtcgggaacacatgtcccagcgcgatataagaggggcgtgctgccagcgcgacgtcgatttccatatcgtcatgtgtcgaaacgcccagccgcaggcctgccgcgcggatggcattgagatcggtggcttgcaaatcttcctgccccaaatggacgccatacgcctgatgcttgatcgccagccgccagtaatcgttgataaacaatcgcgcgttatagcggcggcccagcgcaattgccgccacgacatcggcttccacctcttcatcgcgccgatctttgatgcgtagctggagagtacgtacgcctgcatccaacagacgttcgatccactgtacgctgtccaccaccgggtacagtcctgaacgaaaaggtacaggaggaaaatcaggctgatacatcacgcttcctccttacgcaggtagatttctccgcctctggcacggaagttctccgacatatccgccattcccatttcaatagtttgcgtggcggcgtaatcacgcacttcctggctgattttcatcgagcagaatttcggcccacacatggagcaaaaatgggcgactttacctgactcttgcggcagggtttcatcgtgataagcgcgggcggtaaacgggtcgagggccagattaaactggtcttcccagcgaaattcgaagcgggctttcgacatggcgttatcgcgaatttgcgcgcccggatgccctttcgccaggtcagcggcgtgggcggcaatcttataggtgataagcccctgcttaacatcttctttattgggcagacccagatgctcttttggcgttacgtaacagagcatcgcgcagccaaaccagccaatcatcgccgcaccaatccccgacgtgaagtggtcatagcccggcgcaatatcggtagttagcggccccagagtgtaaaacggcgcttcgtggcagtgctctaactcctcggtcatattgcggcggatcatctgcatcggcacgtggcctgggccttcaatcatcacctgcacgtcatattcccaggcaattttggtcagttcgcccagcgtatgcagctcggcaaactgcgcttcatcgttggcgtcctgaatagaaccggggcgcagaccgtcgcccagcgacagcgaaacgtcataagcggcacagatttcacaaatttcgcggaagtgttgatagaggaaattttcctgatgatgggagaggcaccatttcgccataatcgaaccgccgcgagagacgataccggtcaggcgtttcgcggtcatcggcacatagcgcagcagtacgcccgcatggatagtgaagtaatccacaccttgctcggcctgttccagcagcgtgtcgcggaacgcttcccaggtaagatcttcggcgatcccgttaaccttctccagcgcctggtagatcggcactgtaccgatcggcaccgggctgttacgcaaaatccactcgcgggtttcgtgaatatagcgaccggtggagagatccatcaccgtatccgctccccagcgcgtggaccataccagcttttccacttcttcttcgatggaagaggtgaccgccgagttgccgatattggcgttaacttttaccaggaaattgcgaccaataatcatcggctccgattccggatgattaatgttggccgggataatcgcacgtccggcagcaacttcatcacggacaaattccgcagtgatattttccggcagatgtgcgccaaagctcattcccggatgctggtggcgtaaaacctcgctacggatgcgctcgcggcccatattctcgcggatggcgatgaattccatttccggcgtgatgatgccctggcgggcgtagtgcagttgggtgacacggcgtcctgctttggcgcgttttggtgttagtacgccgctaaaacgcagttcgtcgaggccatcatctgccagccgcgctttagtgtaatcggaactgcgcacggtaagttcttcggtatcgccgcgcgcatcgatccacggctggcgtagttttgccagcccttgctgcacgttaatggcaatctgcggatcaccatacgggccggaggtgtcgtagaccggaatcgcttcgttttcttcgtactgcggctgttctttgctaccgccaattagcgtcgggctaagctggatctcacgcatcggcacgcgcacgccggggtgtgtgccagtgatataaatgcgttttgagttgggaaaggcggtgccttccagggtgtcgataaaatgttgggcccgggcgcgttgttcgcggcgggtcagttttgttgcagacatagctcattccaaaaagttaaggacgtggcttgtcagacgacggatgaagcaagagacgatcgccgcaggggcgatgcgatagcagattaactcttgttcccttcgcaggtattagcctgatcaggttccgcggatcccgaataaacggtctcagccagttaaggcactccgacaagaaattagccccgcaaatggggcattgaatgtaaattacgcgttaacagcgcagaactcaagcaggatgtttgacgcgggcggcgtcaagcaccagcagaatcagcttatcttccagcacaaagcgcgcttccagcgcctcgccgatgtcagataaaacctgttgaaactcaaggtaattatcatgatcgatggcagtttccagactggaatcgtagtaatccataatctgttgagtattggcttcgagttgcggccaaatcttcgcggcgcgcgcgagttgcccgttgccttccagcttatgaagaatgcgctcataaatactgaaatgtccggcagacaagtaatcgaccaggctctgacaaaaatcatcaagggctttttcgtttagcctcatgtacgattctttgccaggcttaatgccaaccagattgtagtaagccacgagcagatgcttacgtacatgtagccagcgatcaaccagtttgttacttcctctgacgcgctccgtcaggttatcgagctggttaagcatgattgactccgcaagtttgtattcaaaaactgctcagtgagaaatgtaaaaaccatgttaaacatgccagtgatgcaaaggtagtgcaagagctatggatcgtataattgaaaaattagatcacggctggtgggtcgtcagccatgaacaaaaattatggttgccgaagggagaattgccatatggcgaagcggcaaatttcgatcttgtgggtcagcgcgcactacaaatcggcgaatggcagggggaacctgtttggttagtacaacagcagcggcgtcacgatatggggtcggtacgtcaggtcattgatctcgatgttgggctgtttcaactggccggacgaggcgtacaactggcggagttttaccgatcgcataaatactgtggttactgcgggcatgaaatgtatccgagcaaaaccgaatgggcgatgctgtgcagccattgccgtgagcgttactacccgcaaatcgccccctgcattattgttgccatccgtcgcgatgattcgatcctcctcgcccagcatacccgccatcgtaacggtgtccatacagtacttgccggattcgtcgaagtgggcgaaaccctcgagcaggcagtcgcgcgggaagtgatggaagagagcggaattaaagttaaaaacttgcgttacgtgacttctcagccgtggccgtttcctcagtctttaatgaccgcgtttatggcggaatatgacagcggcgacatcgtgatcgacccgaaagaattgctcgaggcgaactggtatcgctatgacgatttgccgttactcccgccgcccggcaccgtagcgcgccgtctgatagaagatacggtggcgatgtgtcgggcagagtatgagtgatgatacactgaccgcctgacgcactaaggaacagccaaaatgaccgaacttaaaaacgatcgttatctgcgggcgctgctgcgccagcccgttgatgtcactccagtatggatgatgcgccaggcgggtcgctatctaccggaatataaagccacgcgcgcccaggcaggcgattttatgtcgctgtgcaaaaacgccgagctggcgtgcgaagtgactttgcaaccgctgcgtcgctacccgctggatgcggcgatcctcttttccgatatcctcaccgtgccggacgcgatggggttagggctctattttgaagccggagaaggtccgcgttttacctcgccagtcacctgcaaagctgacgtcgataaactgccaattccggacccggaagatgaactgggttacgtgatgaacgcggtgcgtaccattcgtcgcgaactgaaaggcgaagtgccgctgattggtttttccggcagcccgtggacgctggcgacctacatggtggaaggcggcagcagcaaagccttcaccgtgatcaaaaaaatgatgtatgccgatccgcaggcgctgcacgctctgctcgataaactggcgaaaagcgtcactttgtatctgaatgcgcagattaaagccggtgctcaggcagtgatgattttcgacacctggggcggcgtgcttaccgggcgcgattatcaacagttctcgctctattacatgcataaaattgttgatggtttactgcgtgaaaacgacggtcgccgcgtaccggtcacgctgtttaccaaaggcggcggacagtggctggaagccatggcagaaaccggttgcgatgcgctgggcctcgactggacaacggacatcgccgatgcgcgccgccgtgtgggcaataaagtcgcgttgcagggtaatatggatccgtcgatgctgtacgcgccgcctgcccgcattgaagaagaagtagcgactatacttgcaggtttcggtcacggcgaaggtcatgtctttaaccttggtcacggcattcatcaggatgtgccgccagaacatgctggcgtgttcgtggaggcagtgcatcgactgtctgaacagtatcaccgctaaggagtgattatggatctcgcgtcattacgcgctcaacaaatcgaactggcttcttctgtgatccgcgaggatcgactcgataaagatccaccggatctgatcgccggagccgatgtcgggtttgagcagggcggagaagtgacgcgagcggcgatggtgctgctgaaatatccctcgcttgagctggtcgagtataaagttgcccgcatcgccaccaccatgccttacattccaggttttctttccttccgcgaatatcctgcgctgctggcagcgtgggagatgctgtcgcaaaagccggatttagtgtttgtcgatggtcatgggatctcgcatcctcgccgtcttggcgtcgccagccattttggcttattggtggatgtgccgaccattggcgtggcgaaaaaacggctctgcggtaaattcgaaccgctctccagcgaaccgggcgcgctggccccactgatggataaaggcgagcagctggcctgggtctggcgcagcaaagcgcgctgtaacccgttgtttatcgctaccggccatcgggtcagcgtggacagcgcgctggcgtgggtacaacgctgcatgaaaggctatcgtctgccggagccaacgcgctgggcggacgcggtggcctcggaacgtccggcgttcgtgcgctatacagcaaatcagccctaattcaggtaaactgcggataatttccgtatttgagaactcaacatgttacaaaacccaattcatctgcgtctggagcgcctggaaagctggcagcatgtcactttcatggcttgcttatgcgaacgcatgtaccccaattacgccatgttctgccagcaaaccggttttggtgatgggcaaatttaccgtcgcattctcgatctcatctgggaaacgctgaccgttaaagacgcaaaagtaaatttcgacagccaactggagaaatttgaagaagcgattccttcagccgacgatttcgatctgtacggcgtttatccggcaatcgatgcctgcgtggcgttaagtgaactggtccattcgcgtttgagtggtgaaacgctcgaacacgcggtggaagtgagtaagacctccatcacgaccgttgcgatgctggaaatgactcaggctggtcgcgaaatgagcgatgaagagcttaaagaaaacccagctgtagagcaagaatgggacattcagtgggaaatattccgacttttagctgagtgcgaagaacgcgatatcgagctgataaaaggccttagggcagacctgcgtgaggcgggtgagagcaatattggtataatttttcagcaataagaccagaaaacgtgatttaacgcctgatttgtcgtacctggagtcttccctttcgccccccgtctggtctacatttggggggcgaaaaaaagtggctatcggtgcgtgtatgcaggagagtgctattctggcatttccgtcgcactcgatgcttagcaagcgataaacacattgtaaggataacttatgaacaagactcaactgattgatgtaattgcagagaaagcagaactgtccaaaacccaggctaaagctgctctggagtccactctggctgcaattactgagtctctgaaagaaggcgatgctgtacaactggttggtttcggtaccttcaaagtgaaccaccgcgctgagcgtactggccgcaacccgcagaccggtaaagaaatcaaaattgccgcagctaacgtaccggcatttgtttctggcaaggcactgaaagacgcagttaagtaagattgcgtggcagtgaacagttttaacgaaggggtggtttcaccccttttgtctttctggcgtcgatcattgatgctggctggcgctctgcttctcactgcctgtagtcataactcttcacttcctccctttaccgccagtggatttgctgaagaccagggcgcggtacgcatctggcgaaaagacagcggcgataatgtgcatctgcttgccgtgtttagcccgtggcgcagtggcgataccacgacgcgagagtatcgctggcagggcgataacctcacgctcatcaatatcaatgtttacagcaaaccgccggtgaatattcgcgcgcgttttgacgatcgcggtgatctgagctttatgcaacgtgaatccgatggggaaaagcagcagctttctaacgaccaaatcgatttataccgttatcgtgctgatcagatccgccagattagcgatgccttacgtcaggggagagtcgtgctgcgccaggggcgctggcatgcgatggaacagaccgtgaccacctgcgaagggcaaaccattaaacctgatttagattcgcaggcgatagcgcatatcgagcgccgccagagccgctcttctgttgatgtcagcgtggcatggctggaagcgcccgaaggttcgcaattactgttagtggcaaactctgatttctgtcgctggcaacccaacgagaaaacgttctgatttaccagtggcccatacccatatgaccgccaccaccgcagccgccgtagcccatgcccattccggctccgcgcggaatacccgcttcagccatcgcgatatctcgtttcacccgtaactcatctaacgactgacgcaaattctccatctctttggcgaccgcgttaattttgctgctatccggtgggttcgcggctaacagggcattgtattcataacgcttcgtcaccagttgctgttgcagtgcgctgctttgagcgtaaaagtcattatggattttctgccacgctgtctgttgttcgctggtcaaaggcgcggcattttgctgccacataccgtgtccgccgtgagcaaatgcagatgtcgatcccatcgccattgctgaaagcgccatcattaccagggcaattttcgtgttccgtttcatggttaatcctccagtggttgtcttacttcgggtattgcatcttccgtgccaacgatgaaacgctgatatgacgggtaatctggcatgataaacgagtaaaaatgactcgcctgctgcgggtagcgagtcatttttactcattgaaacttaagcctttgtgttacagcgcagggtaagcgctgataaaagatggcatgatttctgctgtcagaaagggatgagcaggcaaagaagaagatgcgttttatgcaacgttctaaagactccttagctaaatggttaagcgcgatcctccccgtggtcattgttgggctggtgggattgtttgcggtaactgtgattcgtgattatgggcgggcaagcgaggcagaccgccaggcattactggaaaaaggtaatgtgcttatccgcgctctggagtcgggaagccgcgtagggatggggatgcgaatgcaccatgtacagcaacaggcgcttctggaagagatggcgggacagccgggagtgttgtggttcgcagtcaccgatgcgcagggcatcattattcttcatagcgaccccgataaggtcgggcgtgcgctctattcgccggatgaaatgcagaaattaaagccagaggaaaactcccgctggcggctgcttgggaaaacggaaactacgcctgcacttgaggtctatcgtttgttccagccaatgtcagcgccctggcggcatggaatgcacaatatgccgcgctgtaacggcaaagctgtgccacaagtagatgcacaacaggctatttttatcgccgttgatgccagtgatctggttgcaacccagagtggggaaaagcgcaataccctgattatcctcttcgccctggcgacggtcttgctggcaagcgtattgtcattcttctggtatcgccgctatctgcgctcgcgccagcttctacaagatgaaatgaagcgcaaagagaagctggtggcgctggggcatcttgcggcaggcgttgcccacgaaatccgtaacccactttcctcgattaaaggactggcgaaatactttgccgagcgcgcgcctgcagggggagaagcgcatcaactggcgcaggtgatggcgaaagaggccgaccgtttaaaccgcgtggtaagcgagttgctggaactggttaagccaacgcatctggctttgcaggcggtggatctcaacacgctgattaaccactcattacagctggtaagtcaggatgcaaacagccgggagatccagttacgctttaccgccaacgacacattaccggaaattcaggccgacccggacaggctgactcaggtcctgttgaatctctatctcaatgctattcaggcgattggtcagcatggcgtgattagcgtgacggccagcgaaagcggcgcgggcgtgaaaatcagcgttaccgacagcggtaagggaattgcggcagatcagcttgatgccatcttcactccgtacttcaccactaaagccgaaggcaccggattggggctggcggtcgtgcataatattgttgaacaacacggtggtacaattcaggtcgcaagccaggagggaaaaggctcaacgttcaccctctggcttccggtcaatattacgcgtaaggacccacaaggatgacgcacgataatatcgatattctggtggtggatgatgacattagccactgcactattttgcaggctttactgcgcggctggggctataacgtcgcgctggcgaacagcgggcgacaggcgttggagcaggtgcgggaacaggtttttgatcttgtgctttgcgatgtgcgaatggcggagatggacggcatcgccacgctgaaagagatcaaagcgttaaacccggcaattccggtgctgattatgactgcgtactccagcgtcgagacggcggtagaggcactgaaaactggggcgctggattatctcatcaagccgctggatttcgataacctacaggcgacgctggaaaaagcgctcgcgcatacgcacagtattgatgctgaaacacctgcggtgactgccagccagttcggtatggtcggtaaaagcccggcgatgcaacacctgctcagtgaaatcgccctcgtcgcgccatcggaagccacggtactgatccacggcgattccggcaccggtaaagagctggtcgccagggcgattcacgccagtagcgcacgtagcgaaaaaccgctggtaacgctcaactgtgcggcactcaacgaatccttgctggaatctgaattgttcggtcacgaaaaaggggcgtttactggagccgataaacgccgggaagggcgctttgttgaggcggacggcggcacgctgtttctcgatgaaattggcgatatctcgccgatgatgcaggtgcgtctgctgcgtgcgattcaggagcgcgaagttcagcgtgtcggtagcaaccagattatctcggttgatgtccggctgattgcggcgacccatcgcgatcttgccgcagaggtgaatgccgggcgttttcgccaggatctctactatcgcctgaatgtggtggcgattgaagtaccatcgctgcggcaacggcgggaagatatccctctgctggctggccattttctgcagcgctttgccgagcgtaatcgcaaggcggtaaaaggttttacgccccaggcgatggatctgttgattcattacgactggccgggaaatattcgtgagctggaaaacgcggtggaacgggcagtggtgctgctgaccggggaatatatttccgaacgcgagctgccgctggcgattgccagtacgccgatcccgctgggacaaagtcaggatattcagccgttggtggaagtggaaaaagaggtgattctggcggcgctggagaaaacgggcggcaacaaaaccgaagccgcccgtcagttagggatcacgcgcaaaacgctattggcaaaactgtcgcgttagttctgctcgcgttcgatagcgcgccagccgatatctttccggcagaagcagtcgtcccagtggatatcggtcattaaggcataggcgcgtttctgcgcttctgccacggtatgacccagcgcggtgacgcacagtacgcgcccgccgttggtcactacctgctcgtcatccgccagttttgtgcccgcgtggaacactttgccgcctgccacttcttccagcggcaggccgtggatcacgtcaccggtgcggtaatcacccggatatccacccgcagccatcaccacgccgagagaagcgcgttcatcccactcggacgttttctcgtccagtttgctttcacaggccgccaggcagagctcaaccagatcggacttcatgcgcagcataatcggctgggtttccggatcgccaaagcggcagttaaattcaataaccttcggattgccctgtttgtcgatcatcaggcccgcgtagagaaaaccggtgtaggtgttgccttccgccgccatgcctttcacggttggccagataatacgttccatggtgcgctgatgaacgtcatcggttactaccggcgcgggggagtaagcgcccatcccgccggtgtttggtccggtatctttatcgcctacgcgtttgtgatcctggctggtagccatcggcagcacatgctcgccgtccaccatcacgataaagctcgcttcttcgccatcgaggaactcttcgataacgatgcgatgacccgcgtcgccaaaagcgttgcccgccagcatatcgtgaacagccgcttccgcttcttccagcgtcatcgccacgataacgcctttcccggcagccagaccgtccgctttaatgacgattggcgcgcctttctcacgcagatacgccagcgcaggttctacctcggtgaagttctggtattccgccgtagggatcttatggcgggccaggaaatctttggtaaacgcttttgagccttccagttgggccgcacctgcggttgggccgaagattttcagcccggcggcgcggaaggtatcgaccacgcctttcaccagcggcgcttccgggccgacgatggtcagatcaatcttttcgttttgtgcgaaatccaacagcgccgggatatcggtcacgccaatagcaacgttttgcagcgcgggttccagtgcagtgcctgcattacccggagcaacaaaaacagtctcaaccagcggcgactgggccgctttccaggccagcgcgtgctcgcgcccgccgttaccaatcactaatactttcatctattgctccattaatggcggaagtggcgcatgtcggtgaagagcatcgcaataccgtgctcgtcggcggcggcaatcacttcgtcatcacggatagaaccgccaggctggattacgcaggtcacgcccgcagcggcggcggcatcaataccgtcgcggaacgggaagaacgcgtcagaagccatcgaggaacctttcacttccaggccttcatcggccgctttaataccggcgatttttgcggagtacacgcggctcatctggcccgcgccaatgccgatagtcatattgtttttggcatagacgatagcgttggatttcacaaacttcgccaccttccagcagaacagcgcatcacgcagttcctgttcgctcggctgacgtttggtcaccacgcgcagttcttccgcaccgaccatccccaggtcacgatcctgaaccagcagaccgccgttcacgcgtttgaaatcgaggcccggaacacgctcgccccactgaccgcaggtcagaacgcgtacgttctgtttggcggcggtgattttcagggcttcttcgctggcggacggcgcaataatcacttcgacaaactgacgagaaatgatggcctgtgcggtttccgcatccagctcgcggttaaaggcaatgatgccgccgaatgcggaggttgggtcggttttgtacgcgcgatcgtaagcatcaagaatggaattgccgatagccacgccgcaagggttggcgtgcttcacaatcacacatgccggctcggcgaactctttcacgcactccagcgccgcatcggtatcggcgatgttgttataagagagggctttaccctgaacctgggttgcggtagcaacggaggcttctttcacattctcttctatatagaaggcagcctgctggtggctgttctcgccgtaacgcatatccagcttcttaatgaagttcaggttcagcgtgcgtgggaagcgaccggcggcttctttgctttcaccgtggtaagccggaaccatgctgccgaagtagttggcaatcatgctgtcgtaggcggcagtgtgttcgaaggctttgatggcgaggtcgaaacgggttgcaagcgtcagcgatccttcgttgtcatccatctctttaataatggcgtcatagtcgctgctcttcaccacgattgcgacatctttatggttcttagcggcggagcgcaccatcgttgggccgccgatatcgatgttctcaaccgcatcttccagcgagcaaccttcacgggccacggtctgggcgaacggatacaggttaacaactaccatatcgataggctggatctgatgttcttccataatggcatcgtcctggccgcgacggcccagaatgccaccatgtactttcggatgcagggtcttcacgcgtccatccatcatctccgggaaaccggtgtaatcggaaacttcggttaccggcagacctttttctgctaacagacgggcagtgccccctgtagacagcagctccacaccgcgtgcggaaagtgcctgggcgaattcgacgataccggctttgtcagaaacactgagcagagcgcggcggactggacgacgttgttgcatggtaaatcccctggatttgactattacagagagcgttagctgaatttttcgcgaaaaactcagctaacgcccctaacggggcatccttatttttcgcccgcattgtaacgaaaacgtttgcgcaacgctcgcgaatttttctctttcaatggtgatcacaattttgactgtggttaccgtgggcaaaatacagaaattacattgatgattgtggataactctgtgcgtaaaaaggtataaagcgggcttttgctggggaatgcagcagtcagtcatttttctgcaatttttctattgcggcctgcggagaactccctataatgcgcctccatcgacacggcggatgtgaatcacttcacacaaacagccggttcggttgaagagaaaaatcctgaaattcagggttgactctgaaagaggaaagcgtaatatacgccacctcgcgacagtgcgctaaagcgcgtcgcaactgctctttaacaatttatcagacaatctgtgtgggcactcgaagatacggattcttaacgtcgcaagacgaaaaatgaataccaagtctcaagagtgaacacgtaattcattacgaagtttaattctttgagcatcaaacttttaaattgaagagtttgatcatggctcagattgaacgctggcggcaggcctaacacatgcaagtcgaacggtaacaggaagaagcttgcttctttgctgacgagtggcggacgggtgagtaatgtctgggaaactgcctgatggagggggataactactggaaacggtagctaataccgcataacgtcgcaagaccaaagagggggaccttcgggcctcttgccatcggatgtgcccagatgggattagctagtaggtggggtaacggctcacctaggcgacgatccctagctggtctgagaggatgaccagccacactggaactgagacacggtccagactcctacgggaggcagcagtggggaatattgcacaatgggcgcaagcctgatgcagccatgccgcgtgtatgaagaaggccttcgggttgtaaagtactttcagcggggaggaagggagtaaagttaatacctttgctcattgacgttacccgcagaagaagcaccggctaactccgtgccagcagccgcggtaatacggagggtgcaagcgttaatcggaattactgggcgtaaagcgcacgcaggcggtttgttaagtcagatgtgaaatccccgggctcaacctgggaactgcatctgatactggcaagcttgagtctcgtagaggggggtagaattccaggtgtagcggtgaaatgcgtagagatctggaggaataccggtggcgaaggcggccccctggacgaagactgacgctcaggtgcgaaagcgtggggagcaaacaggattagataccctggtagtccacgccgtaaacgatgtcgacttggaggttgtgcccttgaggcgtggcttccggagctaacgcgttaagtcgaccgcctggggagtacggccgcaaggttaaaactcaaatgaattgacgggggcccgcacaagcggtggagcatgtggtttaattcgatgcaacgcgaagaaccttacctggtcttgacatccacggaagttttcagagatgagaatgtgccttcgggaaccgtgagacaggtgctgcatggctgtcgtcagctcgtgttgtgaaatgttgggttaagtcccgcaacgagcgcaacccttatcctttgttgccagcggtccggccgggaactcaaaggagactgccagtgataaactggaggaaggtggggatgacgtcaagtcatcatggcccttacgaccagggctacacacgtgctacaatggcgcatacaaagagaagcgacctcgcgagagcaagcggacctcataaagtgcgtcgtagtccggattggagtctgcaactcgactccatgaagtcggaatcgctagtaatcgtggatcagaatgccacggtgaatacgttcccgggccttgtacacaccgcccgtcacaccatgggagtgggttgcaaaagaagtaggtagcttaaccttcgggagggcgcttaccactttgtgattcatgactggggtgaagtcgtaacaaggtaaccgtaggggaacctgcggttggatcacctccttaccttaaagaagcgttctttgcagtgctcacacagattgtctgatagaaagtgaaaagcaaggcgtcttgcgaagcagactgatacgtccccttcgtctagaggcccaggacaccgccctttcacggcggtaacaggggttcgaatcccctaggggacgccacttgctggtttgtgagtgaaagtcacctgccttaatatctcaaaactcatcttcgggtgatgtttgagatatttgctctttaaaaatctggatcaagctgaaaattgaaacactgaacaacgaaagttgttcgtgagtctctcaaattttcgcaacacgatgatgaatcgtaagaaacatcttcgggttgtgaggttaagcgactaagcgtacacggtggatgccctggcagtcagaggcgatgaaggacgtgctaatctgcgataagcgtcggtaaggtgatatgaaccgttataaccggcgatttccgaatggggaaacccagtgtgtttcgacacactatcattaactgaatccataggttaatgaggcgaaccgggggaactgaaacatctaagtaccccgaggaaaagaaatcaaccgagattcccccagtagcggcgagcgaacggggagcagcccagagcctgaatcagtgtgtgtgttagtggaagcgtctggaaaggcgcgcgatacagggtgacagccccgtacacaaaaatgcacatgctgtgagctcgatgagtagggcgggacacgtggtatcctgtctgaatatggggggaccatcctccaaggctaaatactcctgactgaccgatagtgaaccagtaccgtgagggaaaggcgaaaagaaccccggcgaggggagtgaaaaagaacctgaaaccgtgtacgtacaagcagtgggagcacgcttaggcgtgtgactgcgtaccttttgtataatgggtcagcgacttatattctgtagcaaggttaaccgaataggggagccgaagggaaaccgagtcttaactgggcgttaagttgcagggtatagacccgaaacccggtgatctagccatgggcaggttgaaggttgggtaacactaactggaggaccgaaccgactaatgttgaaaaattagcggatgacttgtggctgggggtgaaaggccaatcaaaccgggagatagctggttctccccgaaagctatttaggtagcgcctcgtgaattcatctccgggggtagagcactgtttcggcaagggggtcatcccgacttaccaacccgatgcaaactgcgaataccggagaatgttatcacgggagacacacggcgggtgctaacgtccgtcgtgaagagggaaacaacccagaccgccagctaaggtcccaaagtcatggttaagtgggaaacgatgtgggaaggcccagacagccaggatgttggcttagaagcagccatcatttaaagaaagcgtaatagctcactggtcgagtcggcctgcgcggaagatgtaacggggctaaaccatgcaccgaagctgcggcagcgacgcttatgcgttgttgggtaggggagcgttctgtaagcctgcgaaggtgtgctgtgaggcatgctggaggtatcagaagtgcgaatgctgacataagtaacgataaagcgggtgaaaagcccgctcgccggaagaccaagggttcctgtccaacgttaatcggggcagggtgagtcgacccctaaggcgaggccgaaaggcgtagtcgatgggaaacaggttaatattcctgtacttggtgttactgcgaaggggggacggagaaggctatgttggccgggcgacggttgtcccggtttaagcgtgtaggctggttttccaggcaaatccggaaaatcaaggctgaggcgtgatgacgaggcactacggtgctgaagcaacaaatgccctgcttccaggaaaagcctctaagcatcaggtaacatcaaatcgtaccccaaaccgacacaggtggtcaggtagagaataccaaggcgcttgagagaactcgggtgaaggaactaggcaaaatggtgccgtaacttcgggagaaggcacgctgatatgtaggtgaggtccctcgcggatggagctgaaatcagtcgaagataccagctggctgcaactgtttattaaaaacacagcactgtgcaaacacgaaagtggacgtatacggtgtgacgcctgcccggtgccggaaggttaattgatggggttagcgcaagcgaagctcttgatcgaagccccggtaaacggcggccgtaactataacggtcctaaggtagcgaaattccttgtcgggtaagttccgacctgcacgaatggcgtaatgatggccaggctgtctccacccgagactcagtgaaattgaactcgctgtgaagatgcagtgtacccgcggcaagacggaaagaccccgtgaacctttactatagcttgacactgaacattgagccttgatgtgtaggataggtgggaggctttgaagtgtggacgccagtctgcatggagccgaccttgaaataccaccctttaatgtttgatgttctaacgttgacccgtaatccgggttgcggacagtgtctggtgggtagtttgactggggcggtctcctcctaaagagtaacggaggagcacgaaggttggctaatcctggtcggacatcaggaggttagtgcaatggcataagccagcttgactgcgagcgtgacggcgcgagcaggtgcgaaagcaggtcatagtgatccggtggttctgaatggaagggccatcgctcaacggataaaaggtactccggggataacaggctgataccgcccaagagttcatatcgacggcggtgtttggcacctcgatgtcggctcatcacatcctggggctgaagtaggtcccaagggtatggctgttcgccatttaaagtggtacgcgagctgggtttagaacgtcgtgagacagttcggtccctatctgccgtgggcgctggagaactgaggggggctgctcctagtacgagaggaccggagtggacgcatcactggtgttcgggttgtcatgccaatggcactgcccggtagctaaatgcggaagagataagtgctgaaagcatctaagcacgaaacttgccccgagatgagttctccctgaccctttaagggtcctgaaggaacgttgaagacgacgacgttgataggccgggtgtgtaagcgcagcgatgcgttgagctaaccggtactaatgaaccgtgaggcttaaccttacaacgccgaagctgttttggcggatgagagaagattttcagcctgatacagattaaatcagaacgcagaagcggtctgataaaacagaatttgcctggcggcagtagcgcggtggtcccacctgaccccatgccgaactcagaagtgaaacgccgtagcgccgatggtagtgtggggtctccccatgcgagagtagggaactgccaggcatcaaattagaaaaaccccggtccataaggccggggttttttgcatatcaattatttgcatgatgaagggaatctcatgtcagttctgtatatccaaattcgtcgtaatcaaattactgttcgcgatcttgaaagcaaacgtgaagtgtcaggagacgctgccttcagtaaccagcgcctgttaatcgccaatttctttgttgcagaaaaagttctgcaagatcttgttctgcaactccacccacgttcaacctggcattcttttttgccagcaaaacgtatggatattgttgtgagcgcgctggaaatgaatgagggcggtttgtcacaggttgaggaacgcattctccatgaagtggtcgctggggcaacgttaatgaaatatcgccagttccacatccatgcgcaatcagcggtactcagtgatagtgcggtcatggcaatgcttaagcagaaataatcgtgtcaccattggtgggtactaaacctgaagttcagcccaccgggatgagaaaaaatcgcctacgcccccacatacgccagattcagcaacggatacggtttccccaaatcgtccacctcagagcgtcccgtaaccttaaaacccaccttcttatagaacccaaccgcctgctcattttgctcattaacgttggttgtcagttccggtgccatcgagagcgcatgctccaccagcacccgacctacgccgcagccgcgcacatcaggatcgataaacagcgcatccatatgctgcccacttagcaacataaatccaaccggctgatcccgctcattaaccgcgacccacaacggcgcttccggcaggaaggaacgaactaggtcctccagctcggtccgatactctgctgatagaaaatcgtgagtggcatcgacagaacgacaccaaatcgcaacgagttcctccccttcctcatgccgtgagcggcgaatactaataaccattttctctccttttagtcattcttatattctaacgtagtcttttccttgaaactttctcaccttcaacatgcaggctcgacattggcaaattttctggttatcttcagctatctggatgtctaaacgtataagcgtatgtagtgaggtaatcaggttatgccgattcgtgtgccggacgagctacccgccgtcaatttcttgcgtgaagaaaacgtctttgtgatgacaacttctcgtgcgtctggtcaggaaattcgtccacttaaggttctgatccttaatctgatgccgaagaagattgaaactgaaaatcagtttctgcgcctgctttcaaactcacctttgcaggtcgatattcagctgttgcgcatcgattcccgtgaatcgcgcaacacgcccgcagagcatctgaacaacttctactgtaactttgaagatattcaggatcagaactttgacggtttgattgtaactggtgcgccgctgggcctggtggagtttaatgatgtcgcttactggccgcagatcaaacaggtgctggagtggtcgaaagatcacgtcacctcgacgctgtttgtctgctgggcggtacaggccgcgctcaatatcctctacggcattcctaagcaaactcgcaccgacaaactctctggcgtttacgagcatcatattctccatcctcatgcgcttctgacgcgtggctttgatgattcattcctggcaccgcattcgcgctatgctgactttccggcagcgttgattcgtgattacaccgatctggaaattctggcagagacggaagaaggggatgcatatctgtttgccagtaaagataagcgcattgcctttgtgacgggccatcccgaatatgatgcgcaaacgctggcgcaggaatttttccgcgatgtggaagccggactagacccggatgtaccgtataactatttcccgcacaatgatccgcaaaatacaccgcgagcgagctggcgtagtcacggtaatttactgtttaccaactggctcaactattacgtctaccagatcacgccatacgatctacggcacatgaatccaacgctggattaatcttctgtgatagtcgatcgttaagcgattcagcaccttacctcaggcaccttcgggtgccttttttatttccgaaacgtacctcagcaggtgaataaattttattcatattgttatcaacaagttatcaagtatttttaattaaaatggaaattgtttttgattttgcattttaaatgagtagtcttagttgtgctgaacgaaaagagcacaacgatccttcgttcacagtggggaagttttcggatccatgacgaggagctgcacgatgactgaacaggcaacaacaaccgatgaactggctttcacaaggccgtatggcgagcaggagaagcaaattcttactgccgaagcggtagaatttctgactgagctggtgacgcattttacgccacaacgcaataaacttctggcagcgcgcattcagcagcagcaagatattgataacggaacgttgcctgattttatttcggaaacagcttccattcgcgatgctgattggaaaattcgcgggattcctgcggacttagaagaccgccgcgtagagataactggcccggtagagcgcaagatggtgatcaacgcgctcaacgccaatgtgaaagtctttatggccgatttcgaagattcactggcaccagactggaacaaagtgatcgacgggcaaattaacctgcgtgatgcggttaacggcaccatcagttacaccaatgaagcaggcaaaatttaccagctcaagcccaatccagcggttttgatttgtcgggtacgcggtctgcacttgccggaaaaacatgtcacctggcgtggtgaggcaatccccggcagcctgtttgattttgcgctctatttcttccacaactatcaggcactgttggcaaagggcagtggtccctatttctatctgccgaaaacccagtcctggcaggaagcggcctggtggagcgaagtcttcagctatgcagaagatcgctttaatctgccgcgcggcaccatcaaggcgacgttgctgattgaaacgctgcccgccgtgttccagatggatgaaatccttcacgcgctgcgtgaccatattgttggtctgaactgcggtcgttgggattacatcttcagctatatcaaaacgttgaaaaactatcccgatcgcgtcctgccagacagacaggcagtgacgatggataaaccattcctgaatgcttactcacgcctgttgattaaaacctgccataaacgcggtgcttttgcgatgggcggcatggcggcgtttattccgagcaaagatgaagagcacaataaccaggtgctcaacaaagtaaaagcggataaatcgctggaagccaataacggtcacgatggcacatggatcgctcacccaggccttgcggacacggcaatggcggtattcaacgacattctcggctcccgtaaaaatcagcttgaagtgatgcgcgaacaagacgcgccgattactgccgatcagctgctggcaccttgtgatggtgaacgcaccgaagaaggtatgcgcgccaacattcgcgtggctgtgcagtacatcgaagcgtggatctctggcaacggctgtgtgccgatttatggcctgatggaagatgcggcgacggctgaaatttcccgtacctcgatctggcagtggatccatcatcaaaaaacgttgagcaatggcaaaccggtgaccaaagccttgttccgccagatgctgggcgaagagatgaaagtcattgccagcgaactgggcgaagaacgtttctcccaggggcgttttgacgatgccgcacgcttgatggaacagatcaccacttccgatgagttaattgatttcctgaccctgccaggctaccgcctgttagcgtaaaccaccacataactatggagcatctgcacatgaaaacccgtacacaacaaattgaagaattacagaaagagtggactcaaccgcgttgggaaggcattactcgcccatacagtgcggaagatgtggtgaaattacgcggttcagtcaatcctgaatgcacgctggcgcaactgggcgcagcgaaaatgtggcgtctgctgcacggtgagtcgaaaaaaggctacatcaacagcctcggcgcactgactggcggtcaggcgctgcaacaggcgaaagcgggtattgaagcagtctatctgtcgggatggcaggtagcggcggacgctaacctggcggccagcatgtatccggatcagtcgctctatccggcaaactcggtgccagctgtggtggagcggatcaacaacaccttccgtcgtgccgatcagatccaatggtccgcgggcattgagccgggcgatccgcgctatgtcgattacttcctgccgatcgttgccgatgcggaagccggttttggcggtgtcctgaatgcctttgaactgatgaaagcgatgattgaagccggtgcagcggcagttcacttcgaagatcagctggcgtcagtgaagaaatgcggtcacatgggcggcaaagttttagtgccaactcaggaagctattcagaaactggtcgcggcgcgtctggcagctgacgtgacgggcgttccaaccctgctggttgcccgtaccgatgctgatgcggcggatctgatcacctccgattgcgacccgtatgacagcgaatttattaccggcgagcgtaccagtgaaggcttcttccgtactcatgcgggcattgagcaagcgatcagccgtggcctggcgtatgcgccatatgctgacctggtctggtgtgaaacctccacgccggatctggaactggcgcgtcgctttgcacaagctatccacgcgaaatatccgggcaaactgctggcttataactgctcgccgtcgttcaactggcagaaaaacctcgacgacaaaactattgccagcttccagcagcagctgtcggatatgggctacaagttccagttcatcaccctggcaggtatccacagcatgtggttcaacatgtttgacctggcaaacgcctatgcccagggcgagggtatgaagcactacgttgagaaagtgcagcagccggaatttgccgccgcgaaagatggctataccttcgtatctcaccagcaggaagtgggtacaggttacttcgataaagtgacgactattattcagggcggcacgtcttcagtcaccgcgctgaccggctccactgaagaatcgcagttctaagcaacaacaaccgttgctgactgtaggccggataaggcgttcacgccgcatccggcaatcggtgcacgatgcctgatgcgacgcttgcgcgtcttatcatgcctacagccgttgccgaacgtaggccggataaggcatttacgccgcatccggcaatcggtgcacgatgcctgatgcgacgcttgcgcgtcttatcatgcctacaaccgttgccgaacgtaggctggataaggcgtttacgccgcatccggcaattctctgctcctgatgagggcgctaaatgccgcgtggcctggaattattgattgctcaaaccattttgcaaggcttcgatgctcagtatggtcgattcctcgaagtgacctccggtgcgcagcagcgtttcgaacaggccgactggcatgctgtccagcaggcgatgaaaaaccgtatccatctttacgatcatcacgttggtctggtcgtggagcaactgcgctgcattactaacggccaaagtacggacgcggcatttttactacgtgttaaagagcattacacccggctgttgccggattacccgcgcttcgagattgcggagagcttttttaactccgtgtactgtcggttatttgaccaccgctcgcttactcccgagcggctttttatctttagctctcagccagagcgccgctttcgtaccattccccgcccgctggcgaaagactttcaccccgatcacggctgggaatctctactgatgcgcgttatcagcgacctaccgctgcgcctgcgctggcagaataaaagccgtgacatccattacattattcgccatctgacggaaacgctggggacagacaacctcgcggaaagtcatttacaggtggcgaacgaactgttttaccgcaataaagccgcctggctggtaggcaaactgatcacaccttccggcacattgccatttttgctgccgatccaccagacggacgacggcgagttatttattgatacctgcctgacgacgaccgccgaagcgagcattgtttttggctttgcgcgttcttattttatggtttatgcgccgctgcccgcagcgctggtcgagtggctacgggaaattctgccaggtaaaaccaccgctgaattgtatatggctatcggctgccagaagcacgccaaaaccgaaagctaccgcgaatatctcgtttatctacagggctgtaatgagcagttcattgaagcgccgggtattcgtggaatggtgatgttggtgtttacgctgccgggctttgatcgggtattcaaagtcatcaaagacaggttcgcgccgcagaaagagatgtctgccgctcacgttcgtgcctgctatcaactggtgaaagagcacgatcgcgtgggccgaatggcggacacccaggagtttgaaaactttgtgctggagaagcggcatatttccccggcattaatggaattactgcttcaggaagcagcggaaaaaatcaccgatctcggcgaacaaattgtgattcgccatctttatattgagcggcggatggtgccgctcaatatctggctggaacaagtggaaggtcagcagttgcgcgacgccattgaagaatacggtaacgctattcgccagcttgccgctgctaacattttccctggcgacatgctgtttaaaaacttcggtgtcacccgtcacgggcgtgtggttttttatgattacgatgaaatttgctacatgacggaagtgaatttccgcgacatcccgccgccgcgctatccggaagacgaacttgccagcgaaccgtggtacagcgtctcgccgggcgatgttttcccggaagagtttcgccactggctatgcgccgacccgcgtattggtccgctgtttgaagagatgcacgccgacctgttccgcgctgattactggcgcgcactacaaaaccgcatacgtgaagggcatgtggaagatgtttatgcgtatcggcgcaggcaaagatttagcgtacggtatggggagatgcttttttgagtaaagcttccatataatttttctccgcaatgtatcgagggttatccgtaaagccaaagctttcagccatcttatttaatgtattaaggattaattcagcaataacccggtgaccaaattcaaaagccaactcaaaggcagagtatttttgtggggctttgtgttgccaaaaatccataatatcttcagcggtaaatccaaacaggcgtgcatggtcagataaagcaagataaaccgtctctacaacattttgttgtttatgctgtatcgctgaaaacaaaccgggatattcattagaattatttgccaggaggaggggcttcatattttttttatcgaatttaaacgtattaaacagagtgggtaatgcgttaaaaatagtattaataacgttcatatgtccgcgctgcatggccataaacaaacccgtgtcgcgcgcaagacttttagcggtcagaagatctacaatatcggaagctgaaatgttaatttcctgggctaggctgggcaatgcttcaagaataactttcacgatatcgctatgtccattttgcatcgccagatatagtcctgggcaaccataaaaatcctttgccttcaggagatcgagtacctgttctttagtcaaatgacatgtgcgaattaacaaaggtaacgcgttcaaaacaattttcagcatgtcggcatcaccattcgccataacatggtataaaacatggctggacgttctatttttggcactcaggaatttatacacttgttcgttatctaaatgatgtgttgcggccagtttaggtaaggcgttcagaatcgaggttacaacatttttatccttacgtgatatcgctaaaaataatccagaaaaaccatttttatcttttgcctccagaatatgcatgagattttttttcgagagtaatccttcatatcctgtttctgacaatgaattgaaaatagtctcaacgatatccgcattaccataatttatagccaaatataaacctggcaggttaatactattataggcagtcaacatttctgttctatgtagttctggcattttctggagttgaatcatcagttgcgtaagttggtgattctgaccaattgccattagcaaattcatcgttgcaggtgataatggaggggttatttcatccacagatccttttaacatcaatagctgttctttcggaagtgctggaattattgcaacagattgattaataacatgatcatttgaccatttcaggaggctataatctacattcataaaatccatcagagaatagtgtttaatattctctttgctttcgctcataattcttattttatcgttagttacattaggatcataaaccgaaaccacgtaatgggtacatccttcagttgtgttctttattcttagccggaccgtcaaagcatggttatccaccagtaatatggctgccataacactgatgccatttgattccatcttgtcaaaatatgctttcataactagcccgaaatcaccgcaggcagcaacgcaacgcccctcaggacggctggaaaccaacgccaaagtctggtttttgcattttttgttgaagtgcgtgagaaatttttcagctgaagagtaatcatcttgatggggtttgtaatcaacattctgataaatatcattaatatattgtgcagcaatgtgtcggcatactatacggttttggggtcgccccggaaaataacattgaccattaagtttaattcttgatcgataggaatttaaatccccaaaagactaaaaaagcaccacaaaacggatatttcttcaacaccccttgtgcaccatatgagcggaaacgactattaaacaggatgacactgattgatacagggtatgaatggcggttttttgctccgtttccggtaaaatggacgcaacttcccctctgcggctctcagccgcacacctgctgtcgtgccagtcgctcatgcatcaggaccagctctgccagtcggtaaccccgcttcagccccgtaaaacgcatctgacttccgcacagaatgcacttcagcgggtcaaccttcagtaacctctgatacatccctctccacctgatttgcatcgccgtttttctcaccgtctccgttatgacgtacacaacatcttccagtaaccggcgcttcaccggactcaggaaaccgtagtacctcaccatacggaaccccttatccgccacatgccaggagaacctttccataaactcatcaccactcatcaccaggtattcttcccgttttgtccggtgactgttgtaacgcagaccaatttcatcctgaccagcatagtgctccagacggctcatcggcaccggcggttttttcaggtaagagccgaagtacaccgccacatgtgtggcgttatccatcacccgggatacgttgacattccagccccgccggtaatgactgtccaggaagcgattccagtcccgtttactgcttccttctgctgccagcgcatccggtatcaccaggtccggatatttccgtgacagtaaccgcgttatccggtaacgccacatactcatcaccttacgggcgtaaaaatgaaggtttttccaggtgtggtctgatgtcacgccgccggtcgttgtcgacaggtgaatgtgcggatgccactgctggtcacgtccccatgtgtggatgaccgtgaatatccccggcaccacatctgcctggcggcagatttcctgtatcacatccgcagcaatgcggctcatctctgccagtaaccaccggttgtggaacaccagggaccagtactggcagggaagtgtgaacacaatatgctgccacggacagtcgggaaccagactcagcagatactgtatccactgtgcgccagccttcactccgcagtgcgggcaggagcgacttttacaccggaagcagatcttttttatgtggctgcagtccggagatgaacagcaccactgtgtgtaccccatcagcgtggtcccgcaggccatgatttttgtcacagactcaatgactaccggacgcactgaaccttccggttgtttctccagccagttaagccagcggtttccctgctgaaaaatgtcggcaaaacggggaagcatcagaagggcggggggactccgtccggccagtgaaccgtgccacactccgggcagtacatgccgccggcgctgataccggcaagaatggttgcaaactcccgctccgtgcagcgggctatttcaggatacccttcgtcatcgacacgaacaaaccagaagaccagctttttgtttccggcatccacaaagaagggaatattcaggtctgcgcagcactcaacggcatcgtcaaaattatcaaagcgcagagcttctgcgtcttcttcgtcaaagaagtcatcgtcgtgaagcttcacgacatagcggggaagtttgcttctttgaggggcaggttttcgtttacggggtttagctgaacgggccatataactacctgaaagacaatgacattatctttttttataacggtaattccagaccatgacaagccgcagccgccaggctgcctactcgggaattctttttcttttctatctgattttaggtttaattcttgtttatcaagagtgtctgagcgttgaggtaaaatttccattaggtatttttcaaatattggggcaatggtttgagtaagtgtcgtgttttcgtttttattaattatcgtaatttctttcttatcagcttgtaagacggacgtggaaaatttaatgacaaaatccttgttgctaaagatatgacgaccattttgtctacagttctctgagaagctttttaatagaggcgtcgccagctccttgccagaaaatttatcctcgagttctttataaaacaattcactcagggtttggtgttcatttgtctgggctgtattattaatatttgcagagaaagaactacgaggaatacgagtaatcatttaaatatctcattgtttattgatgtcttgaattttaactatcagaacagtgaaaaaatttaatatgattacaactaaataaatatcataaatcgctcaatctcataatgcagccgtaaaagtttcggtggaatgagatcttgcgattttgttaataattaagtggtttgatgtttaaaaataatgctgagttaataaaagtgtgtgaagtgtatgacattaagttattttggcgtcaatgcgattaacagacacccttattctattgccactcaggtatgatgggcagaatattgcctctgcccgccagaaaaagtcagcgcattccaccgtacgccagcgtcacttccttcgccgctttaatcaccatcgcgccaaactcggtcacgcggtcatcggtaatacgtgaaatcggtccggaaatagaaattgcggcaaacggttcacggtgctcatcgaaaatacacgctgcaaggcaacgtagccccagtgcatgttcctcatcgtcaaatgaataaccccgtttgcgcgtttgggcgagatcttcttttaaatgcacaggagacaccagcgttgcgtgggtataggcatgtaaccctttgcggtgcagcagcttcgtcacctgttcttcgctcagttgggctaaaaaggctttacccgcaccggaagcgtgcatcggcaatttaccgccgataggcgcggacattcgcatcagatgcgtacactgtacctggtcgataataatcgcttcgtgatcgctttgatcaagcaccgccatattgaccgtttcgccagactcttccattagattgcgcaggatagggtgaacaatcgctaacaaattacggctctggagaaagctgctgccgaccataaaggcatgtgcgccgattgcccaatgtcccagttcgccaacctgacgcacgaaaccctgctgttgcatcgtggttagcaggcggtgggtcgtggaattgggtaacccggcttgttgcgccagttccgtgagtgccacactgccattggattcggcaatccactccagtaatttcaggccacgcgttaaagactgaacctgtccagtcgctggtgcggtggcaacggcgggttttctgccgcgtttcgcgggaatgggtgcgaccatgacagtctcctttttctgtatcgtggaaatcattttcatttttattgttagctaatgcaatagttactgaactgatccgatgagttaatgttgaacaaatctcatgttgcgtggtggtcgcttttaccacagatgcgtttatgccagtatggtttgttgaatttttattaaatctgggttgagcgtgtcgggagcaagtgtgagcagcaaagtggaacaactgcgtgcgcagttaaatgaacgtattctggtgctggacggcggtatgggcaccatgatccagagttatcgactgaacgaagccgattttcgtggtgaacgctttgccgactggccatgcgacctcaaaggcaacaacgacctgctggtactcagtaaaccggaagtgatcgccgctatccacaacgcctactttgaagcgggcgcggatatcatcgaaaccaacaccttcaactccacgaccattgcgatggcggattaccagatggaatccctgtcggcggaaatcaactttgcggcggcgaaactggcgcgagcttgtgctgacgagtggaccgcgcgcacgccagagaaaccgcgctacgttgccggtgttctcggcccgaccaaccgcacggcgtctatttctccggacgtcaacgatccggcatttcgtaatatcacttttgacgggctggtggcggcttatcgagagtccaccaaagcgctggtggaaggtggcgcggatctgatcctgattgaaaccgttttcgacacccttaacgccaaagcggcggtatttgcggtgaaaacggagtttgaagcgctgggcgttgagctgccgattatgatctccggcaccatcaccgacgcctccgggcgcacgctctccgggcagaccaccgaagcattttacaactcattgcgccacgccgaagctctgacctttggcctgaactgtgcgctggggcccgatgaactgcgccagtacgtgcaggagctgtcacggattgcggaatgctacgtcaccgcgcacccgaacgccgggctacccaacgcctttggtgagtacgatctcgacgccgacacgatggcaaaacagatacgtgaatgggcgcaagcgggttttctcaatatcgtcggcggctgctgtggcaccacgccacaacatattgcagcgatgagtcgtgcagtagaaggattagcgccgcgcaaactgccggaaattcccgtagcctgccgtttgtccggcctggagccgctgaacattggcgaagatagcctgtttgtgaacgtgggtgaacgcaccaacgtcaccggttccgctaagttcaagcgcctgatcaaagaagagaaatacagcgaggcgctggatgtcgcgcgtcaacaggtggaaaacggcgcgcagattatcgatatcaacatggatgaagggatgctcgatgccgaagcggcgatggtgcgttttctcaatctgattgccggtgaaccggatatcgctcgcgtgccgattatgatcgactcctcaaaatgggacgtcattgaaaaaggtctgaagtgtatccagggcaaaggcattgttaactctatctcgatgaaagagggcgtcgatgcctttatccatcacgcgaaattgttgcgtcgctacggtgcggcagtggtggtaatggcctttgacgaacagggacaggccgatactcgcgcacggaaaatcgagatttgccgtcgggcgtacaaaatcctcaccgaagaggttggcttcccgccagaagatatcatcttcgacccaaacatcttcgcggtcgcaactggcattgaagagcacaacaactacgcgcaggactttatcggcgcgtgtgaagacatcaaacgcgaactgccgcacgcgctgatttccggcggcgtatctaacgtttctttctcgttccgtggcaacgatccggtgcgcgaagccattcacgcagtgttcctctactacgctattcgcaatggcatggatatggggatcgtcaacgccgggcaactggcgatttacgacgacctacccgctgaactgcgcgacgcggtggaagatgtgattcttaatcgtcgcgacgatggcaccgagcgtttactggagcttgccgagaaatatcgcggcagcaaaaccgacgacaccgccaacgcccagcaggcggagtggcgctcgtgggaagtgaataaacgtctggaatactcgctggtcaaaggcattaccgagtttatcgagcaggataccgaagaagcccgccagcaggctacgcgcccgattgaagtgattgaaggcccgttgatggacggcatgaatgtggtcggcgacctgtttggcgaagggaaaatgttcctgccacaggtggtcaaatcggcgcgcgtcatgaaacaggcggtggcctacctcgaaccgtttattgaagccagcaaagagcagggcaaaaccaacggcaagatggtgatcgccaccgtgaagggcgacgtccacgacatcggtaaaaatatcgttggtgtggtgctgcaatgtaacaactacgaaattgtcgatctcggcgttatggtgcctgcggaaaaaattctccgtaccgctaaagaagtgaatgctgatctgattggcctttcggggcttatcacgccgtcgctggacgagatggttaacgtggcgaaagagatggagcgtcagggcttcactattccgttactgattggcggcgcgacgacctcaaaagcgcacacggcggtgaaaatcgagcagaactacagcggcccgacggtgtatgtgcagaatgcctcgcgtaccgttggtgtggtggcggcgctgctttccgatacccagcgtgatgattttgtcgctcgtacccgcaaggagtacgaaaccgtacgtattcagcacgggcgcaagaaaccgcgcacaccaccggtcacgctggaagcggcgcgcgataacgatttcgcttttgactggcaggcttacacgccgccggtggcgcaccgtctcggcgtgcaggaagtcgaagccagcatcgaaacgctgcgtaattacatcgactggacaccgttctttatgacctggtcgctggccgggaagtatccgcgcattctggaagatgaagtggtgggcgttgaggcgcagcggctgtttaaagacgccaacgacatgctggataaattaagcgccgagaaaacgctgaatccgcgtggcgtggtgggcctgttcccggcaaaccgtgtgggcgatgacattgaaatctaccgtgacgaaacgcgtacccatgtgatcaacgtcagccaccatctgcgtcaacagaccgaaaaaacaggcttcgctaactactgtctcgctgacttcgttgcgccgaagctttctgataaagcagattacatcggcgcatttgccgtgactggcgggctggaagaggacgcactggctgatgcctttgaagcgcagcacgatgattacaacaaaatcatggtgaaagcgcttgccgaccgtttagccgaagcctttgcggagtatctccatgagcgtgtgcgtaaagtctactggggctatgcgccgaacgagaacctcagcaacgaagagctgatccgcgaaaactaccagggcatccgtccggcaccgggctatccggcctgcccggaacatacggaaaaagccaccatctgggagctgctggaagtggaaaaacacactggcatgaaactcacagaatctttcgccatgtggcccggtgcatcggtttcgggttggtacttcagccacccggacagcaagtactacgctgtagcacaaattcagcgcgatcaggttgaagattatgcccgccgtaaaggtatgagcgttaccgaagttgagcgctggctggcaccgaatctggggtatgacgcggactgattcacaaatctgtcacttttccttacaacaaacagggcgctcaatgagtgccctgtctctttattaatatgaaacacttatactggaaacaggctggaataatcttagccggaaaaacgaatgtcaaaaggcacagtaaagatgccagtcagcgtgtttccggtcctttggtcattcaattgcttcaggaacatataacgataaggagaacctgaactcgtgttaacgctgcttcacctgctttctgccgtcgccctgctggtctgggggactcatattgttcgaaccggcgtaatgcgcgtcttcggcgcgcgtttgcgtactgtccttagccggagcgtcgaaaaaaagccgctcgccttttgcgcggggatcggcgttaccgcactggtacagagcagtaatgccaccaccatgctggtgacctcgtttgtcgctcaggatctggtagccctcgcaccggctctggtcattgtgctgggtgcagatgtcgggacggcgctaatggcgcgtattctcaccttcgacttatcctggctgtcaccgttacttatttttatcggcgtgatttttttcctcggacgcaaacagtcacgcgccgggcaactgggccgcgtcggtattggtcttgggctgattttgctagcgctggagttgattgtgcaggccgtaacgccgatcacccaggcaaacggcgttcaggtgatctttgcctcgctgaccggcgatattctgctggatgcgctgattggcgcgatgttcgccattatcagctactccagccttgctgctgtactgctgaccgcgactctgaccgccgcaggcattatctccttccccgtggcgctctgtctggtgattggtgctaacctcggttccggtctgctggcaatgctcaacaacagtgccgccaatgccgcagcccgccgtgtcgcgctgggtagtctgctgtttaagctggtgggtagcctgattatcctgccgtttgtccatttgctggcagagacaatggggaagttgtcattgccaaaagcggaactggtgatctatttccacgtcttctacaaccttgtacgttgcctggtcatgctgccatttgttgacccgatggcacggttttgcaaaacgattattcgcgatgaactggaactggatacccagctacggcctaaacatctggatgtcagcgcgctggatacgcccacgcttgctctggcgaacgccgcgcgcgaaaccctgcgcattggcgacgccatggaacagatgatggaagggttgaataaagtgatgcacggtgagccacggcaggagaaagagctgcgtaagctggcagatgatatcaacgttctctacaccgccattaagctgtatctggcgcggatgccaaaagaagagctggcggaggaagagtcgcgccgctgggcagagatcatcgaaatgtcgctcaaccttgaacaggcctccgatatcgtcgagcgcatgggcagcgaaattgctgacaaatcactggcagcacggcgggcattttcgcttgatgggttgaaggaactggatgcgctctatgagcaattgctcagtaatttaaagctggcaatgtcggtgttcttctctggcgatgtcaccagcgctcgtcgtttgcgtcgcagcaaacatcgttttcgcattcttaatcgccgctattcccacgcccacgtcgatcgcctgcatcagcaaaacgtgcagagcattgaaaccagttcgctacatttaggcttactgggagatatgcagcgcctgaactcgctgttttgttcggtggcttacagtgtgctggaacagccggatgaagatgaaggacgggacgagtattaatattgtgaatcctgtaggcctgataagacgcgtcaagcgtcgcatcaggcactatgaacaagatgccggatcatgcatccggcaattcacttaaaaacggtgaccagcttccagcggaaccgcttcttcaccagccttaaacacataagtggtgttcgggccacccagcgtagcgtgacctttactcactgtgatccagttaccttccggtagaccaataatcgtcagttctggcgcgacgaccagcagttcgcgaatacgctgctcacgggtttcacctttatggccttccggcagcgcgttggtgaagtgcgggttgatttgcagcgggaacagatttagcgcatcgaaaccttgcggatcgacaatcggcatatcgttggtggtacgaatagttgggcaagcaaggttagcgcctgcgctccagccaatatacagagcgccacgtttaaccacgtcagtaattggtgccagcagcccgcgctcgcggcactgtttcagcaactggaaagtattcccgccgccgacaatcacgatctcagcattttcaatcgcggcaacgggatcgacaacgctatgaataccggtgacagaaacacccagcggagcgagaaccgcagccgttttcgctgtgtaatcatcccaggtctgcgttacgccagcgaaagggataaacaccgctgagcggcgaccctgcaactgttcagcaattagcggcagtgcatgttccagccaggctttacccggcagcgtcgagttactcaataaaagcagttccattacttctccggttagtaagaaatcacgggaggcatgctaccactgcgaatttaaccacttactgacatggctcacgatgtcgcacattgcttctggaaagtgatttgagcaggtaacgaattcaagccaatggaaataacaaatagttcgctcatgactattttttatcaacccaaaggtacggtatattccgttttttacaggagaatttatgctgcccgactcatcagtccgtttaaataaatacatcagcgaaagcggaatttgctcacgccgcgaagcggatcgctatatcgagcaaggcaatgtgttccttaatggcaagcgagccaccattggcgatcaggtgaaacccggcgacgttgtgaaagtaaacggtcagttgattgaacctcgggaagccgaagatttggtacttatcgccctgaacaagcccgttggtattgtaagcaccaccgaagatggcgagcgcgataacattgtcgatttcgttaaccacagcaaacgcgtgttcccgattggccgcctggataaagactcccaggggctgattttcctcaccaatcacggcgatctggtgaataagatcctgcgtgctggcaatgatcatgagaaagagtatctggtgacggtcgataaaccgattaccgaggagtttattcgcggcatgagtgcgggggtgccaatcctcgggacagtgaccaaaaagtgcaaagttaaaaaagaagcgccgtttgtcttccgcattaccctggtgcaggggctgaaccgtcagatccggcgcatgtgcgagcatttcggctatgaagtgaaaaagctggaacgcacgcgcatcatgaacgttagcttaagcggcattccgctgggggaatggcgcgatttaaccgacgatgagttaatcgacctctttaagctcattgaaaattcctcttccgaggtaaaacctaaagcgaaggccaaaccgaaaacagcgggcatcaaacgtccagtcgttaagatggaaaaaacggcggaaaaaggcggtcgcccggcgtccaacggtaagcgttttacctcgccggggcgtaaaaagaaggggcgctgattaacgcctcagactgatgaaaacggcccaaaagtgcccggacagtcccctcgccccttcgggaaaagggttagggtgaggggaaaattgtgttcacactgacgagtgaaaatctcaggcgttgattgtggattagcgcctgccgcgcgtcgacgtatttgctgaccagctaaatgacgcttcaggatccggtttataagcctgctttttcttcaactggcgggcttttttcgcttcagcctcacgctcaaccattaatttatcgatgtaatctttcttaatgctgttggtttcggagttggtcaatacgcgaccatgcgcaatccgcgcccgatccagcagtgttttaagttcacgctgctcgcgttcagtcatctctttttgggtaatacgggggagtgccatgatggtgccctcagtgagccagagagttcagtgtacgggaattcgtttgcgagcagaactgataatattcattttgccttctcttaactatttatctctttcgataattaattagagatgcagataaaaaaattaaaggcaattattctccgataaagacgctggttaacagagtacaggctcgtttattgatgagcatagtgacaagaaaatcaatacggcccgaaatatagcttccaggccatacagtatttactcaaacaaattactatgcagtttttgcaccacctgctcggcatcttcgccgggcaccaggaagcacaggttatggctggatgcgccataacaaatcatgcgaatgttgaacggttccagtacgccgaatacctctttgccaacgccgcaggcttttgacaggtcattgccaatcaacgcgaccagcgccagaccttcttccacctccacccgacacagtgcggaaagctccatcagcagagattgcgtcagcaacgtatcgccagtggaggttgaaccggtggtatcaagggttaatgccacgctcacttctgacgtggtgattaagtctaccgaaatattatgccgcgcgaggatgccgaaaacttccgcgaggaaaccgcgagaatgcagcatattcaggctgtgcaaagtgagcagagtctgattgcgacgaagcgccagagcgcggaacagcggcggattttcagttttattgcacaccagcgtaccacctgcgcgtgggtctttgctggagccgacaaagaccgggatatcgctgcgtactgcgggtagcaacgttgccggatgcagtacttttgcaccaaaagttgccatctctgccgcttcggcaaacgcgatttcatcaatgcgttttgctgcggaaactacgcgtggatcggtggtgtagatgcccgggacgtcggtccagatatcaacacgagatgcgtgtaaagcctccgccagcaaggctgccgtataatcgctgcctccacggccaagcgtcgttgtacgacctttattttcgctaccgataaatccctgggtgatcactaagccttcattgagacgtgggagcagctgcagcgcggccagttccgccagcgcggctatatctggctctgcacgaccaaatcggtcgttggtacgcatcactttacgtacatcaaaccactgtgcctgaacatcgcgttcgcgcaggatctcaacaaacagcagggtcgacatcagctcgccgtggctgaccagctcatctgtcagcgccggagacgttgccagcgccgccgcttctgccagaacagtaatgttctccagcagacgttcaatctcttcacggataacgttcgggtaacgcagacgttccagaatggcaaactggatgttgcggatagcgtcgagtttttcgaatcgctcgccaggttccagtccttcagctaaagcgaccagcagattagtgataccagcagaagccgagaggacaactaaacgcacgttggcatcagaaagcacaatatcagcgctgcggttcatggcgtcaaaatcagctacgctggtaccgccaaatttggagacaacaatttcagacataactacctcgtgtcaggggatccattttcagccttggcacaagggaagagcggaagacgggtgggcgcagagcgatacttcgctactattttcacccagaagtgctccaccacttgcgaaacgcccgactgcgaacgcttctggtgacaacccaggggattcagcccctgtagccgatgatgaacgtggccagccgttcaatcacctcggcgatgcaccccctcaggtgttatcacaggactggctcctccaacaccgttacttgggcaacgcgcctcttctggcctgcgctagcgcaggtagtacatttataaataaagggtgagcggggcggttgtcaacgatggggtcatgcggatttttcatccactcctggcggtcagtagttcagctaataaatgcttcactgcgctaagggtttacactcaacattacgctaacggcactaaaaccatcacatttttctgtgactggcgctacaatcttccaaagtcacaattctcaaaatcagaagagtattgctaatgaaaaacatcaatccaacgcagaccgctgcctggcaggcactacagaaacacttcgatgaaatgaaagacgttacgatcgccgatctttttgctaaagacggcgatcgtttttctaagttctccgcaaccttcgacgatcagatgctggtggattactccaaaaaccgcatcactgaagagacgctggcgaaattacaggatctggcgaaagagtgcgatctggcgggcgcgattaagtcgatgttctctggcgagaagatcaaccgcactgaaaaccgcgccgtgctgcacgtagcgctgcgtaaccgtagcaataccccgattttggttgatggcaaagacgtaatgccggaagtcaacgcggtgctggagaagatgaaaaccttctcagaagcgattatttccggtgagtggaaaggttataccggcaaagcaatcactgacgtagtgaacatcgggatcggcggttctgacctcggcccatacatggtgaccgaagctctgcgtccgtacaaaaaccacctgaacatgcactttgtttctaacgtcgatgggactcacatcgcggaagtgctgaaaaaagtaaacccggaaaccacgctgttcctggtagcatctaaaaccttcaccactcaggaaactatgaccaacgcccatagcgcgcgtgactggttcctgaaagcggcaggtgatgaaaaacacgttgcaaaacactttgcggcgctttccaccaatgccaaagccgttggcgagtttggtattgatactgccaacatgttcgagttctgggactgggttggcggccgttactctttgtggtcagcgattggcctgtcgattgttctctccatcggctttgataacttcgttgaactgctttccggcgcacacgcgatggacaagcatttctccaccacgcctgccgagaaaaacctgcctgtactgctggcgctgattggcatctggtacaacaatttctttggtgcggaaactgaagcgattctgccgtatgaccagtatatgcaccgtttcgcggcgtacttccagcagggcaatatggagtccaacggtaagtatgttgaccgtaacggtaacgttgtggattaccagactggcccgattatctggggtgaaccaggcactaacggtcagcacgcgttctaccagctgatccaccagggaaccaaaatggtaccgtgcgatttcatcgctccggctatcacccataacccgctctctgatcatcaccagaaactgctgtctaacttcttcgcccagaccgaagcgctggcgtttggtaaatcccgcgaagtggttgagcaggaatatcgtgatcagggtaaagatccggcaacgcttgactacgtggtgccgttcaaagtattcgaaggtaaccgcccgaccaactccatcctgctgcgtgaaatcactccgttcagcctgggtgcgttgattgcgctgtatgagcacaaaatctttactcagggcgtgatcctgaacatcttcaccttcgaccagtggggcgtggaactgggtaaacagctggcgaaccgtattctgccagagctgaaagatgataaagaaatcagcagccacgatagctcgaccaatggtctgattaaccgctataaagcgtggcgcggttaatcatcgtcgatatgtaggccggataaggcgttcacgccgcatccggcaaccgatgcctgatgcgacgcggtcgcgtcttatcaggcctacaggtcgatgccgatatgtacatcgtattcggcaattaatacatagcacgattgattaaataaccttaataacaatgccgacgttatgtcggcatttttttatcagataaatccccttgtctgtgatttaacggaaatcataccatgaggttaatcctaaaatagatttttaatcgttgtttatttcggaaaatacgcagattaattgcttttgtttttattttaagtttatgatttttattgttatttaaatataagttgaaacttatatttgatattcattccaattatcctaaaacgccatcgctaattccccgcgccgtaattcgcatgctttagttgtgtatactcgatcccgcccgaaatgtttttgggtaaatctccattcattcaatgaagggaaattgttatgaaaaaagttctgtatggcatttttgccatatctgcgcttgcggcgacttctgcgtgggctgcacctgtacaggtgggcgaagcggcagggtcggcagcaacgtcggtttcggcggggagttcctccgcgaccagcgtcagcaccgtaagctcggcggtgggtgtcgcgcttgcggcaaccggtggcggtgatggttctaataccgggaccaccacaaccacgaccaccagtacccagtaataaagtatgtatccccaaaataattcgagtcattgcatctgtggctagaagtatgaagggattaaccataaccacactccggtgtggttattctgcccctctggagaagagtcgtgaagcgacctgcactcattcttatctgcctgttattacaggcctgttcagccacgactaaagagctgggcaattcactgtgggacagtctgttcggcacgccaggcgtacagctgacggatgatgatattcaaaatatgccctacgccagccagtacatgcagcttaatggcgggccgcagttatttgtggtgctggccttcgctgaagacggacaacaaaaatgggtcactcaggatcaggctactctcgttacccaacatggccgtctggtgaagactctgctcggcggcgacaacctgattgaagtgaataaccttgctgccgacccgctgattaaacccgcacaaatcgttgatggcgcaagctggacgcgcacgatgggctggaccgagtaccagcaggtacgctacgccaccgcacgctcagtcttcaaatgggatggcaccgataccgtcaaagtcggcagcgatgaaaccccggttcgcgtgctggacgaagaagtctccaccgaccaggcgcgctggcataaccgctattggatcgacagcgaagggcaaattcgccagtcggaacagtatctcggcgcggattattttccggtgaaaaccactctcatcaaggcggcaaaacaatgattaaacaaactattgtcgcgttgcttttgagtgtgggagcgtcatcggtcttcgcggcaggaaccgtcaaggtgttcagcaatggcagcagtgaggccaaaacgctaacgggcgcagagcatttaatcgatctggtaggccaaccgcggctggcaaacagctggtggcccggtgcggtgattagcgaagagctggcaacggcggcagcattgcgtcagcagcaggcgttgctgacacggctggcagaacagggcgcagattccagcgccgacgatgccgctgcgattaacgccttacgccagcaaattcaggcgttgaaagtgacgggcaggcaaaaaatcaatcttgatcccgatatcgtccgcgttgccgaacgcggtaacccgccgttgcagggcaactacacgctgtgggtcggaccaccgccgtccacggtcacgttgttcgggcttatcagccgtcctggcaagcagccattcactccaggtcgcgacgtggcgagctatctctctgaccagagcctgctcagcggtgcggatcgcagctacgcgtgggtggtttacccggacggacgcacgcaaaaagcgccggtggcttactggaacaagcgtcacgtagagccgatgcccggcagcattatttatgttggcctcgcggactccgtctggagtgagacgcctgatgcccttaacgccgacattcttcagactctgacgcagcggatacctcaataatgaaaaaaagacatctgcttagcttactggcgctgggcattagcacagcttgctacggcgaaacatatcctgcgcccattggtccgtcgcagtcggatttcggtggcgtaggattattacaaacgcccaccgcgcgtatggcacgggaaggggagttgagtctgaactatcgcgataacgatcagtaccgttattactcagcttcagtgcaactcttcccgtggctggaaacaacgctgcgctacaccgacgtgcgcacccggcagtacagcagcgtcgaagcgttctctggcgatcaaacgtataaagataaagccttcgatctcaaactgcgtttgtgggaagagagttactggctgccgcaagtggcggttggtgcgcgggatatcggcggtacggggctgtttgatgcggaatatcttgttgccagcaaagcctgggggccgttcgattttacgctcggcctgggctggggatatttgggcaccagcggtaatgtgaaaaatccgctctgttcagccagtgataaatattgctatcgcgataacagctacaaacaggcgggatctatcgacggtagccagatgttccacggtcctgcctcactgtttggcggcgtggaataccagacgccctggcaaccgctgcgcctgaaactggagtatgaaggcaataattatcagcaggattttgccgggaagctggagcaaaaaagtaagtttaacgtcggtgcgatttatcgcgttaccgattgggccgacgttaaccttagctatgaacgtggcaacacctttatgtttggcgttacgttgcgcaccaactttaacgatctgcgcccgtcttacaacgataacgcccgcccgcaatatcaaccgcagccgcaggatgccattttgcagcattcggtggtggcgaatcagttaacgctgttgaaatacaatgccggacttgccgatccacagatccaggcgaaaggcgatacgctgtatgttaccggcgagcaggtgaaatatcgtgattcgcgcgaagggatcatccgtgcgaatcggatcgtgatgaacgatctgccggatgggatcaaaacgatccgcattacggaaaatcgccttaacatgccgcaggtgacgacggaaaccgatgtcgccagcctgaaaaatcatctcgccggagagccgttgggccacgaaacgacgctggcgcaaaaacgcgtcgagccagtggttccgcagtccaccgagcagggctggtatatcgacaaatcacgctttgatttccatatcgatccggtgctgaaccagtcggtcggtggcccggaaaacttttacatgtatcagctgggcgtgatgggaacggcagatttgtggctgacggaccatctgctgaccaccggcagcctgtttgcaaatcttgccaacaactacgacaagtttaactacactaatcctccgcaggactcgcacttaccgcgcgtgcgtacccatgtgcgcgagtatgtgcagaacgatgtctatgtgaataacctgcaagccaactacttccagcatctgggcaacggcttctacggtcaggtctacggtggttatctcgaaaccatgtttggcggtgcgggggcagaagtgttgtatcgcccgctggacagcaactgggcgtttggtctggatgccaactacgttaaacagcgcgactggcgtagtgcaaaagatatgatgaaattcaccgactacagcgtgaaaaccggacatctgaccgcctactggacgccatctttcgctcaggatgtgttagttaaagccagcgtcgggcagtatctggcaggggataaaggcggcacgctggagatcgccaaacgctttgatagcggcgtggtggtgggtggctatgccacgatcactaatgtttcgaaagaggagtacggcgaaggggacttcaccaaaggcgtgtatgtctcggtaccgttggatctcttctcgtctggcccgacacgcagccgtgcggcgattggctggacgccgctgacgcgtgacggtggtcagcaacttgggcgtaagttccagttgtatgacatgaccagcgaccgtagcgtcaatttccgctaagtcatgggaaaggtgccagttttcgcactcactggcaccttcattcttaatggcctgtcgagccatcaggaacgcagttcactcccggtttgcgatctggtgtgtaaaggcgaaaacattctgtcttcctgtccgtcgatatcggttgcaggtctggttgcctgagcgactgggccatcattgggctggagacattgctttgcggtaggtcggctttatcagcagtaccgagcggaccagcataagcaggaagaacagagactgataacatcaaagcagcaaaataaggcttcatttttaccacctttatcaggttacgtttcatttgttccagaggaacattgtcgatttttcgcgcattgctggtggctgggaatcacctgaatgggtgatttttgaattaccggctttggtgcggtttgtcttgccggatgcgccgccaggcgcggcttatccggcctacgggtaggtatatccggctttggtggaggcgcgctccaaatccaggttgaacaaaacatacacaaaaaatatagatctccgtcacatttttgcgttatacaggaagctcgccactgtgaaggaggtactgctatgacgtcactctctcgtccgcgcgtggagtttatctccaccattttgcagaccgtactcaatcttggcctgctgtgcctcggcctgattttggttgtcttcctcggcaaagaaacggtgcatctggctgatgtgctgttcgcgccagaacaaaccagcaaatatgagctggtagaaggactggtggtttactttctctatttcgaatttatcgcgctgattgtgaagtactttcagtccggttttcacttcccgctacgttactttgtctatattgggatcaccgccattgtgcgcttgatcatcgtcgatcataaatcgccactggatgtgttgatctactcggctgcgatcctgttactggtgatcaccctgtggctgtgtaattcgaaacggctgaagcgggagtaaaaagtcagcacgccgaaatggcgcggcgtgctggacaggaagattacagcgtagcagtttgttgtgttttcttcgtttccggttcccagagcgcttccagctcctcaagggttttacctttggtttccgggacaaatttccacataaacagtgctgccagaacgcccatacaaccgtaaatccagtaggagaaaccgttgtggaaatgggccaccagccaggagtttttgtccatcatcgggaaggtccaggagacgaagtagttcgccagccactgggccgccaccgcgattgccagcgctttaccacgaatagcattcgggaagatttccgacagcagtacccagcataccggaccccaggacatggcaaaggcggcaacatagaacagcatcgacagtagcgccacaatacccggtgcctgagtgtaaaacgcggtaccgaggctaaacataccgattgccattccgagtgcgccgataatttgcagtggcttacgaccaaatttatccaccgtcataattgccagaacggtgaaggtgaggttgataactccgacaataatggtctgcaacagcgcgatatccgtgctggcccccagcgttttgaacacttccggcgcgtagtacagcaccacattgatgccgacaaattgctggaagatggagagcattacgccgattacaatcacgcccacgccaaacatcagcagacgaccaccggttttgcggccatgatccagggagtgtttaatttcctgtactgcctgagttgcaagcgtgttgcccataattttgcgcaggataccttccgcctgttcttgcttgccgcgcgacatcagccagcgaggactttctggcacggtatacagcagcattaagaacagcagtgcagggatacattccgaggcaaacatataacgccagccgtcagtattcagccagctggcatcaccggaacgggcaataaaatagtttacgcagtaaactaaaagttgcccgaaaataatcgcaaactggttaaaagagaccagtttcccgcgaatatgagctggagccagttccgcaatatacattggcgagagcattgaggctaaaccaacgccaataccgccaataatgcgataaataacaaattccgggacataacctgccagataaacaggcacagtgttgtccgggtttatagaggtaaaaccaagttctggccaggcagaacctacaccagaaataaaaaacaggacagcagcaatcttaagtgaatcacgacgaccgaagcggttactgcagtaaccaccgagggcaccgccgatgatgcaaccaatcagagcgctggccacgcaaaaccctaacagggagttggcagcggattcacttaagttttgtggagcaacaaagacggtattgagtgactcaacagtaccggaaataacggcggtgtcgtagccaaataataaaccacctaatgtagcgactaaggtaatcgaaaatatataactggaattatactgggtattcattcagacctgccttagaccattctgatcttttatcagtgcattgatgttggaattgtcaggcagttaaggcaattatcattttttacaatgcgtttacgtaatgtcttttctgtgatcttaattgtgataattatccaaaattgataaaaacaatactattgccgtgactcagagcacgaaagagaattatcgtaagtgggaaaacaaataacgtaaaaataataagctctatgatggaaatattaaccggcgaacgattcagattgcagacgaaagaaaaaaaggcgctccgtggagcgccgaataacagtcacaagttgggataacgtaagttgagggtgcagcggcataacattggcagaacaacatctttaacctttcacaccacctgccgtcaggccgttgaccagccagcgttgagccagcaagaagacgatggtgatcggtaatgcagacatcacggcagcggcggcaaagtcaccccacaggtagttttgcgggttgaggtattgctgcatccccacggccagggtgtagctgtttacgtcacgcagtaacagcgacgcgaccggaacttcagtaatggcagcgataaacgacaggatgaataccaccgccagaatcggtactgacagcggcaacaggacaaggcggaaggcctgccacggtgtcgcaccatccagcgcagcagcttcttccagcgaactgtcgatggtttcgaaatagcctttgatggtccagacatgcagcgcaatcccacccagatacgcgaaaattacgccgccgtgagtattcaggccaatgaatggaatgtactcacccagacgatcaaacaacgcatacaacgcgaccagtgaaagtactgccgggaacatctggaaaatcagcattcctttcagcagcgtcgctttgcctggaaagcgcatacgggcgaaagcgtaggcgcaggtggtggagagcgccacaatgccaatcgcggaaatcccggcgacctttaccgagttccacagccacagcagtaccgggaatggcggtggcgtaatgcgaccatcagcctgttcaacgctaaaacctaacgccagtttccagtgatcccaggagatttgctccgggatcaggctgccggtcgcaaagtttccctgacgcagcgagatagcgacgaccatcagcagcgggaacataatcgctgcgataaaaagtagcagtagcaggtgagtaataaataaacgagctttttgcgatttcggttggaccattgccatttttgttatctcccttaatcaaacttcattcgcgtggctttcaggttcactatcgccagcgcacccaccagcaggaagatcagcgtggcaattgctgccgccagaccgaagtcctgacccccgccgccttcaaaagcgatgcggtaggtgtagttaacaagcaggtcggtataaccggctggcgtggtcgtgccaagacgatccgggccgccgttggttaacagttgaatcagcacgaagttgttaaagttaaaggcgaagctggcgatcatcagcggcgtcagcggtttaatcagcagcggcagcgtaatcttaaagaagttctggaacggacctgcgccatccattgctgaggcttcatacaaatcgtccggaatcgctttcagcaagcccatgcagaggatcatcatgtacggataacccagccaggtattgacgataattagcatcgtgcgggcggtggtcggatcgctgaaccaggcgggcttcacgccaaacagcgcgctcaacatcatgttgatttcaccgaagctctggttaaacaaccctttgaaaatcaagattgaaatgaacgatggcaccgcgtagggcagaatcagcaggacgcgatagaccgctttgccgcgcaacgcttcccactgcaccagacacgccagaaccatgccgaccgccaccgttaaaaagacagtgatcagcgagaacaccacggtccagacgaaaatggcgaggaacggtttctgaatgccttcgtcggtaaagacgcgggtaaagtttttccagccggtggtcacggtgtaaccggggcttagcttttcatcaccccagttgccgtcggcggtaatggactggtaaaagccaatttggttattcggacgatatttcacgccgctctgattattcgtcaacgtgccgtcaccgtcgagtgtgtagagcggctgcgtgccagaaaactggcgcagggagctcatcatcactttgttgccatccggcagaatggcggtaatgtcactcagcgcctgacgattctgggtaatcacgcgcagattcgcgcgttcgccttcgggctgggcggtcgtttctttcagttgcagtttttgctcgccgccaaatttaaaagcgtcggagaggtaatttttgccggtttcgccgtcgctgagcgccagttgccactcatcgcccgccgggtaaagaccaaagttataggttttgcctgcttgccaggagcgatctaacaacacttcctgcgcacgttcaaaagtcagctggttagtgctgctgtagttggtgaaggcaatggcgatggtgcagaccagagggaagaggacgaataatcccattccagccattcccgggtaaacatagcgccaggcgtaggctttacgattggcgaaaatatacagccccgctgaactcaatatcagcgtggtaatggcgaacaggtattccccttgtgcgtacattaaaacaacaaggtaacccaccagcaggccgagcagacctagcactgaccatttcagcgcgtcgctttgccaccaatgtttctttttaatgacatccatggggttcttcctcattccaggacggataaggctttcacgccttatccgacaacaactgcctgatgcgacgctgacgcgtcttatcaggcctacatacgtttcggttttgtaggccggacaaggcgttcacgccgcatccggcatttcacagcattacttggtgatacgagtctgcgcgtctttcagggcttcatcgacagtctgacgaccgctggcggcgttgatcaccgcagtacgcacggcataccagaaagcggacatctgcgggatgttcggcatgatttcacctttctgggcgttttccatggtggcggcaatacgtggatctttcgccaactcttcctcgtaagacttcagcgctacggcacccagcggtttgtctttattaaccgcttccagaccttcatcagtcagcagatagttttcgaggaactctttcgccagctctttgttcggactggcggcgttaatacctgcgctcagcacgccaacgaacggtttggatggttgacccttgaaggtcggcagtaccgttacaccataattcactttgctggtgtcgatgttggaccatgcccacgggccgttgatggtcatcgctgtttcgcctttattaaaggcagcttctgcgatggagtaatcggtgtctgcattcatgtgtttgtttttaatcaggtcaaccaggaaggtcagacccgctttcgcgccagcgttatccacgcccacgtctttaatgtcgtacttgccgttttcatacttgaacgcataacccccgtcagcagcaatcagcggccaggtgaagtacggttcttgcaggttgaacatcagcgcgctcttacctttcgctttcagttctttatccagcgccgggatctcttcccaggtttttggcgggttcggcagcagatctttgttataaatcagcgataacgcttcaacagcgatcgggtaagcaatcagcttgccgttgtaacgtacggcatcccaggtaaacggatacagcttgtcctggaacgctttgtccggggtgatttcagccaacaggccagattgagcgtagccaccaaagcggtcgtgtgcccagaagataatgtcagggccatcgccagttgccgcaacctgtgggaatttctcttccagtttatccggatgctcaacggtgactttaattccggtatctttctcgaatttcttaccgacttcagcgagaccgttatagcctttatcgccgttaatccagattaccagtttaccttcttcgattttggcgagagccgaggcggaaaacatcatcgtcgttaatgcggataatgcgaggatgcgtgcacctgtttttattttcataatctatggtccttgttggtgaagtgctcgtgaaaacacctaaacggactctagtttctttatacggcaacctctttccatcctccttgcccctacgccccaccgtcgctttgtgtgatctctgttacagaattggcggtaatgtggagatgcgcacataaaatcgccacgatttttgcaagcaacatcacgaaattccttacatgacctcggtttagttcacagaagccgtgttctcatcctcccgcctcctcccccataaaaaagccagggggtggaggatttaagccatctcctgatgacgcatagtcagcccatcatgaatgttgctgtcgatgacaggttgttacaaagggagaagggcatggcgagcgtacagctgcaaaatgtaacgaaagcctggggcgaggtcgtggtatcgaaagatatcaatctcgatatccatgaaggtgaattcgtggtgtttgtcggaccgtctggctgcggtaaatcgactttactgcgcatgattgccgggcttgagacgatcaccagcggcgacctgttcatcggtgagaaacggatgaatgacactccgccagcagaacgcggcgttggtatggtgtttcagtcttacgcgctctatccccacctgtcagtagcagaaaacatgtcatttggcctgaaactggctggcgcaaaaaaagaggtgattaaccaacgcgttaaccaggtggcggaagtgctacaactggcgcatttgctggatcgcaaaccgaaagcgctctccggtggtcagcgtcagcgtgtggcgattggccgtacgctggtggccgagccaagcgtatttttgctcgatgaaccgctctccaacctcgatgctgcactgcgtgtgcaaatgcgtatcgaaatctcccgtctgcataaacgcctgggccgcacaatgatttacgtcacccacgatcaggtcgaagcgatgacgctggccgacaaaatcgtggtgctggacgccggtcgcgtggcgcaggttgggaaaccgctggagctgtaccactatccggcagaccgttttgtcgccggatttatcggttcgccaaagatgaacttcctgccggtaaaagtgaccgccaccgcaatcgatcaagtgcaggtggagctgccgatgccaaatcgtcagcaagtctggctgccagttgaaagccgtgatgtccaggttggagccaatatgtcgctgggtattcgcccggaacatctactgccgagtgatatcgctgacgtcatccttgagggtgaagttcaggtcgtcgagcaactcggcaacgaaactcaaatccatatccagatcccttccattcgtcaaaacctggtgtaccgccagaacgacgtggtgttggtagaagaaggtgccacattcgctatcggcctgccgccagagcgttgccatctgttccgtgaggatggcactgcatgtcgtcgactgcataaggagccgggcgtttaagcaccccacaaaacacacaaagcctgtcacaggtgatgtgaaaaaagaaaagcaatgactcaggagatagaatgatgattactctgcgcaaacttcctctggcggttgccgtcgcagcgggcgtaatgtctgctcaggcaatggctgttgatttccacggctatgcacgttccggtattggttggacaggtagcggcggtgaacaacagtgtttccagactaccggtgctcaaagtaaataccgtcttggcaacgaatgtgaaacttatgctgaattaaaattgggtcaggaagtgtggaaagagggcgataagagcttctatttcgacactaacgtggcctattccgtcgcacaacagaatgactgggaagctaccgatccggccttccgtgaagcaaacgtgcagggtaaaaacctgatcgaatggctgccaggctccaccatctgggcaggtaagcgcttctaccaacgtcatgacgttcatatgatcgacttctactactgggatatttctggtcctggtgccggtctggaaaacatcgatgttggcttcggtaaactctctctggcagcaacccgctcctctgaagctggtggttcttcctctttcgccagcaacaatatttatgactataccaacgaaaccgcgaacgacgttttcgatgtgcgtttagcgcagatggaaatcaacccgggcggcacattagaactgggtgtcgactacggtcgtgccaacttgcgtgataactatcgtctggttgatggcgcatcgaaagacggctggttattcactgctgaacatactcagagtgtcctgaagggctttaacaagtttgttgttcagtacgctactgactcgatgacctcgcagggtaaagggctgtcgcagggttctggcgttgcatttgataacgaaaaatttgcctacaatatcaacaacaacggtcacatgctgcgtatcctcgaccacggtgcgatctccatgggcgacaactgggacatgatgtacgtgggtatgtaccaggatatcaactgggataacgacaacggcaccaagtggtggaccgtcggtattcgcccgatgtacaagtggacgccaatcatgagcaccgtgatggaaatcggctacgacaacgtcgaatcccagcgcaccggcgacaagaacaatcagtacaaaattaccctcgcacaacaatggcaggctggcgacagcatctggtcacgcccggctattcgtgtcttcgcaacctacgccaagtgggatgagaaatggggttacgactacaccggtaacgctgataacaacgcgaacttcggcaaagccgttcctgctgatttcaacggcggcagcttcggtcgtggcgacagcgacgagtggaccttcggtgcccagatggaaatctggtggtaatagcaaaacctgggccggataaggcgtttacgccgcatccggcataaaaacaggttgtcattatctgaaaggggcgaaagcccctctgattatcgggtttagcgcgctattgcctggctaccgctgagctccagattttgaggtgaaaacaatgaaaatgaataaaagtctcatcgtcctctgtttatcagcagggttactggcaagcgcgcctggaattagccttgccgatgttaactacgtaccgcaaaacaccagcgacgcgccagccattccatctgctgcgctgcaacaactcacctggacaccggtcgatcaatctaaaacccagaccacccaactggcgaccggcggccaacaactgaacgttcccggcatcagtggtccggttgctgcgtacagcgtcccggcaaacattggcgaactgaccctgacgctgaccagcgaagtgaacaaacaaaccagcgtttttgcgccgaacgtgctgattcttgatcagaacatgaccccatcagccttcttccccagcagttatttcacctaccaggaaccaggcgtgatgagtgcagatcggctggaaggcgttatgcgcctgacaccggcgttggggcagcaaaaactttatgttctggtctttaccacggaaaaagatctccagcagacgacccaactgctcgacccggctaaagcctatgccaagggcgtcggtaactcgatcccggatatccccgatccggttgctcgtcataccaccgatggcttactgaaactgaaagtgaaaacgaactccagctccagcgtgttggtaggacctttatttggttcttccgctccagctccggttacggtaggtaacacggcggcaccagctgtggctgcacccgctccggcaccggtgaagaaaagcgagccgatgctcaacgacacggaaagttattttaataccgcgatcaaaaacgctgtcgcgaaaggtgatgttgataaggcgttaaaactgcttgatgaagctgaacgcctgggatcgacatctgcccgttccacctttatcagcagtgtaaaaggcaaggggtaattacgccccacagtgctgattttgcaacaactggtgcgtctcctggcgcacctttttttatgcttccttcctgggatatgagcgattttttatagtaactcacttcttcttcactaagaatatccattatctcaatgccttatcagagattcttttcctttcgccggtagtgtctggacattcaggctacttttccaggttattttatttctgttatgcagaggttttatgataagtcatatcctaaattctggcggcaataactctttgatgaaacatgatgtggtgcaaggaaataatatagtagatcttgatttactacgtaatttaaatggggtgccaggtttaaacagagataactttatttatatcagcaatattttttcaaatataaaacaacggaacgaaaaaatcatgcaataaatatgtttcgtgaagtctcaatcagtaatgatactataagtgtaaaattctacagaaatgaaaaaaattgaatgcgcttgcaattttctgatggataaagatgcgcaggggtatatcgacctgtctgatttggatttaacaagttgtcattttaaaggtgacgttatatcgaaggtgtcttttttatcatcaaatctacaacatgtaacattcgaatgtaaagaaattggggattgcaattttactactgcaatagttgataatgtcatatttagatgtcgacgtttacacaatgtgatttttatcaaagcgagtggtgaatgtgtcgatttcagcaaaaatattcttgatacagttgacttctcgcagagtcaacttggtcatagtaattttcgcgaatgtcagattagaaattcaaacttcgataattgttatctttacgcttcgcacttcaccagagcagagtttctgtctgccaaagaaatatcatttattaaatcgaatttgacagctgttatgtttgattatgtgcgaatgtcgacagggaattttaaagattgcattacagaacaattggaattaactattgattattcagatatattttggaatgaagatctcgatggttatatcaataacattataaaaatgattgatacattgccagataatgcaatgatattgaaatccgttctggccgtaaaactggtgatgcaattaaaaatacttaatattgttaataaaaactttattgagaatatgaagaaaatatttagccattgtccttatataaaagatcccattatacgcagttatatccattctgatgaagataacaagttcgatgattttatgcgtcaacatcgattcagtgaggtgaatttcgatacccaacagatgatcgattttattaacagatttaatacgaataaatggctaattgataaaaataacaatttttttatccaacttatcgatcaggccttacgatcaacggatgatatgatcaaagcaaatgtttggcatctttataaagagtggattcgtagtgatgatgtttcacctatatttatagaaactgaagataatttaagaacctttaacacgaatgaattaacacgaaacgataatatctttatcctgttctcctcagtcgatgatgggccagttatggtggtaagctcccagcgcttacatgatatgttgaatcctacaaaagataccaattggaattccacgtatatctacaaatccagacatgagatgttgcctgttaatcttactcaggaaacacttttcagctccaaatctcatggtaaatatgcgcttttccccatttttactgcgagttggcgagctcatcgtataatgaataagggtgtttaagtaaaggaaaacatcaccgttcctggcatcctggacggtgatgcccctacggttgccctcgccagcacgggcatcggtaaagcgtaaggttcaacatcgttttaccacttcatgcgattgttgcgtttttgttgcgtattagatcacttaatttgctttacatctcccgtaaacacttttctgcgatacaatgcctttacgttatgtaacggagagttcggcatgtcacaccccgcgttaacgcaactgcgtgcgctgcgctattgtaaagagatccctgccctggatccgcaactgctcgactggctgttgctggaggattccatgacaaaacgttttgaacagcagggaaaaacggtaagcgtgacgatgatccgcgaagggtttgtcgagcagaatgaaatccccgaagaactgccgctgctgccgaaagagtctcgttactggttacgtgaaattttgttatgtgccgatggtgaaccgtggcttgccggtcgtaccgtcgttcctgtgtcaacgttaagcgggccggagctggcgttacaaaaattgggtaaaacgccgttaggacgctatctgttcacatcatcgacattaacccgggactttattgagataggccgtgatgccgggctgtgggggcgacgttcccgcctgcgattaagcggtaaaccgctgttgctaacagaactgtttttaccggcgtcaccgttgtactaagaggaaaaaaatatggagtggagtctgacgcagaataagctgctggcgtttcatcgcttaatgcgtacggataagccaattggcgcgttactgctgctctggccaacattatgggcgttgtgggtggcgacaccgggcgttccccagctctggatcctggcggtgtttgtcgcgggtgtctggctgatacgcgctgccggatgtgtggtgaatgattatgctgaccgcaagtttgatggtcatgttaagcgcacggcgaaccgaccacttcccagcggcgcggtaacagagaaagaggcgcgcgcgctgtttgtcgtgctggtactgatttcgtttttactggtgctgacgctgaatacgatgaccattctgttgtcgattgccgcgctagcgctggcgtgggtgtacccgtttatgaagcggtatacccatctaccgcaagtggtgctgggcgcggcgtttggctggtcgattccaatggcttttgccgctgtgagtgagtcggtgccattgagttgctggttaatgttcctcgccaatattctctgggcggtggcttacgacacgcagtatgcgatggttgaccgcgatgatgatgtgaagattggcattaaatccacggcaatcctgttcggccaatacgataaattgattattggtattttgcagattggcgtactggcactgatggcgatcatcggtgagttaaatggcttaggctggggatattactggtcaattctggtggctggcgcgctgtttgtttatcaacaaaaactgattgccaaccgcgagcgtgaagcctgctttaaagcatttatgaataataactatgttggtctggtactatttttagggctggcaatgagttactggcatttctgatgatgtaaaaaagccggatgatcatccggctttcttctgggttgcctgatgcgcggcgcttctcaggcctacacaacacatcgcaatttattgaatttgcagattatggaaggccggataaggcgttttcgccgcatccggcaattctctctgattacccttcgccctgcgtcgcactctcaatcgtcaaacgcacgtctgatgtaatcaactccgccagcaactgataaaccttcatcgtttctgccggttcggcatcgccgctatcgctgatatacccttcatcacgcagtgtcagcaccagagaactgaacaccgccttgtcgaagaactccggcgcgttgatgccgtgcagcacggagagacgttgcgcgacggtgcggctctctttctccagcgtaccgcggttgatcgacgggttggcactcaacaaccagaaggtgatggcataacgttgcagcgtttcgcgcgcgcctgcggccagcagctgtagcgtgcgagaatgcgccgggttgatatgcaactcatcatcttgcagggtaatcagcccctgacgttgcatctcatttgccagcgcatcaataacgtccggcaactcgtcgcgatcccagcgcaggaacagctccgctttcagcattgggtaaagcacattgacgtgctccatcaatacgtcgcgggagatgtggcgatgctgggtgacgattgccgccatcagcgaaggcagcaccaacatatgcgcaatgttgttgcgatagtaggtcatcagcaccgcttgctcgcgcggcagaatgatgatgtcgccgattgtgtctttctcgacttcaaacttgttcatttgcagcgcgtgatcgataagctcgctggcgctggctgaaggaacggtagagtccgtggagtagggcacgttgcgcatcagatccaggtagcagttgagttgctcggttaactgctcgcgggtgagtgagcgctgacgtgatgccagtagcgcagtacagcacaggttcatggcgtttgccgcgcctgcgttgttaatgcgtaccatcagatcggcagcaatattattgaccgtcggcgttaaccatgccggacgcaccgcttcgatgggatcgatagattcacgccagtcaggtacatgctggttaaggtaggtcatcaacggcattggttcaccgaagttgacgtaaccctgaccgagattacgcagcttgcttaaaccgcgcagcatctgcggcaggctctctttctctttcgtcgcgccgcgcagttctttggcgtaagtacccacttccatgacgtgctcataaccgatatagatcggaatcagcgtaatcggacgcgtgccgccacgcagcatcgcctgaatggtcatcgacagcgtaccagttttcggatccagcaaacgccccgtacgggaacgaccgccttccacgaagtactcgacggaataaccacggctgaacagttcgccgagatactcccggaaaacggtggaataaagtttattgcctttaaacgtacggcgaataaagaacgcccccagacggcggaaaatcggcccggcaggccagaaattcaggttgatcccggcggcgatatgcggcggcaccagcccctggtgatacagcacgtaagaaagcagcaggtagtccatgtgactgcggtggcaaggcacatataccagctcatgaccgtcgtgggccagctggcgaacgcgctcagcgttatggacgttgatgccctggtaaagtcggttccaggtgaagcccagaatacggtcagtcaggcgaatcatctcgtaagagaaattcgccgcaatctcttccatcagtgcaatcgcgttctgctgcgctttttcatgggagatttttttgctgcgcgcttcatcttctaccgctttggcaatggcgcgggaggcgagcagcttattaaacagatcctgacgagcaggcaaacgtgggcctacggcagccagacgttgacgggcaaagtgcatacgcgccacgcgcgccagtttctgagcgatagttttatccgtgccgtgttcatccgccatacggcgcagcgaaactgacggcgagaaacgcacaaaactgtcgcgaccgagccacagtacagcgaaaaatttctgtacgccgttaagcatacgcagcggcgggttcacttcgcctttttcacgccccggcgcgcgaccaaacatcaccgacactggcaccatctgcacatccagatttgggttgctacggtgcaaatcgagatagtcgtggaacagcttaatagactcttctttcggcgtgtaataggtgaacacacgcggcccgccgtgaatgaacacatagcgcggcagtagcgtgccgtcgatttccagcggctctaacgggtcaggcaagtcatgtgccagacactgggcgcgcaacgtcagcaaatctgctttcgagttgtacggtaaaacgtacataattggacgagaggtatccagccccagttccggggcaggatctgccggaatagacttgctttttaccaggatgcttaatggtaaattcagtaatttgtagtaaattcgtggccagccggacataaacgatgtaaagcctctggttaataatgcaaatgcgcggcaaggatagcagaaagtcatgggaaattctgtggtatccgctcatgtttcgcgcggcgctacgcaaacccgaatcatcggatttaacggtacactgatattgacgctcataatgtaaaaaggttctttcaatggccaataataccactggattcacccgaattatcaaagctgctggctattcctggaaaggtttacgcgctgcatggatcaacgaagcggcattccgtcaggaaggcgtagcggtattgttggcggtggtcatcgcctgctggctggatgtggacgcgattacccgcgtgctgcttatcagctccgtgatgctggtgatgattgtggaaatcctcaatagcgccatcgaagcagtggttgaccgaattggctctgaataccatgagctttccggacgcgcaaaagatatgggatccgctgcggtgctgattgccattatcgtcgccgtgattacctggtgcattctgttatggtcgcattttggataacccttccagaattcgataaatctctggtttattgtgcagtttatggttccaaaatcgccttttgctgtatatactcacagcataactgtatatacacccagggggcggaatgaaagcgttaacggccaggcaacaagaggtgtttgatctcatccgtgatcacatcagccagacaggtatgccgccgacgcgtgcggaaatcgcgcagcgtttggggttccgttccccaaacgcggctgaagaacatctgaaggcgctggcacgcaaaggcgttattgaaattgtttccggcgcatcacgcgggattcgtctgttgcaggaagaggaagaagggttgccgctggtaggtcgtgtggctgccggtgaaccacttctggcgcaacagcatattgaaggtcattatcaggtcgatccttccttattcaagccgaatgctgatttcctgctgcgcgtcagcgggatgtcgatgaaagatatcggcattatggatggtgacttgctggcagtgcataaaactcaggatgtacgtaacggtcaggtcgttgtcgcacgtattgatgacgaagttaccgttaagcgcctgaaaaaacagggcaataaagtcgaactgttgccagaaaatagcgagtttaaaccaattgtcgttgaccttcgtcagcagagcttcaccattgaagggctggcggttggggttattcgcaacggcgactggctgtaacatatctctgagaccgcgatgccgcctggcgtcgcggtttgtttttcatctctcttcatcaggcttgtctgcatggcattcctcacttcatctgataaagcactctggcatctcgccttacccatgattttctccaatatcaccgttccgttgctgggactggtcgatacggcggtaattggtcatcttgatagcccggtttatttgggcggcgtggcggttggtgcaacggcgaccagctttctctttatgctgttgctgtttttacgcatgagcaccaccgggctgactgcgcaggcttatggtgccaaaaatcctcaggcattagcccgtacgctggtgcaaccgttgctgttggcgttgggggctggggcgttaattgcgctgctgcgtacgccgattatcgatctggcgctgcatattgttggcggtagtgaggcagtcctggaacaggcgcggcgctttcttgaaatccgctggttaagcgcaccggcgtcgctggcgaatctggtattactcggttggttactcggcgtgcaatatgcccgtgcgccagtaattttgttagtggtcggcaatatcctcaacattgtgctggatgtctggctggtgatggggctgcatatgaacgtgcagggcgcggcgctggcgacggttattgcggaatatgcaacattgctgattggtctgctaatggtgcgtaaaatcctcaaactacgcggaatttccggcgaaatgctgaaaactgcctggcgaggaaacttccgtcgcttgctggcgcttaaccgcgatatcatgctgcgttcgctgttgttgcaactctgtttcggcgcgatcaccgtacttggcgcgcgactggggagtgacattatcgctgttaacgcggttctgatgacgctactcacctttaccgcctatgcgctggatggttttgcctacgcggttgaagcgcactccggtcaggcatacggtgcgcgcgacggtagccagttgctggatgtctggcgggcagcgtgccgccagtcggggatcgtagcgttactgttttcggtggtttatttgctggctggggaacacatcattgcgttactgacgtcgttaacccagattcagcagctggctgaccgctatcttatctggcaggtgattttgccggtggttggcgtctggtgttatctgctggacggcatgtttataggcgcaacgcgtgccaccgaaatgcgtaacagtatggcggtggccgccgcaggttttgcgctgacgctccttacgctgccgtggctgggtaatcatgctttgtggctggcattaaccgtctttctggcgttgcgcgggctttctctggcggctatctggcggcgtcactggcgcaatggtacctggtttgccgcaacgtgacggttaaaaattctgaataaataatcctaagccaaattgctgactacacttaatctcacgttcagaagaaaagtgaacgtactctcattcacaacctaacgatgaggtcttgattatgaataaagatgaagccggcggtaactggaaacagtttaaaggtaaagtgaaagagcaatggggcaaactgaccgatgatgatatgacgatcattgaaggtaaacgtgatcaactggtcggtaaaatccaggaacgttatggttatcagaaagatcaggcagaaaaagaggtcgtggattgggaaacccgcaatgaatatcgctggtaattaatccctcctgcccgacgtgtacaaggatgtacgccctcttaacgcggtttctttttcacctgcacagagtgatcatgctggcactgttcaggatgacgacacgcttccacttctacacatgccgcacagagcccatgtgcttcaatcacattatgccgcagggcaaaccccatttttgccgccagcgtatgcataatgtcttccacgccttctgcacactcttctttcactgcgccgcagcgatcgcaaataaacatggctgacgtatgggtgggctgatcgaacagatgacagagcacataactgttggtggattccaccttatgcacaaaaccttgctcaagcagaaaatccagcgcgcgataaaccgttggcggcttggcttgcggttcagcttcgcgcagtaaatcaagcagatcataagcgctgatagcgccatcctgcagactcatcaggcgcaacacttccaggcgctgtggggtcaggcgcacattacgctgcgcgcagattttttcagcctgcgctaataactcctgcgttgtggtcttttccatcgggcacctcaaagtgggggttaagaatgtccttactttaccatgttccaggaaaaacaccgagaacccttattgttgccgtaatgttgattttctgttttgtaggtaaggtgttatgttgccttgtcgtaccattatcaacacgataataattaataattcatttttaaataaattgcttcaagttaactcgctatttatttaactgggtttaaacgcatacctgtagttcagaaattatgagcgatttttgatagtgaccagatggcaaaagaattataaggaggacacggtacgacaaaaaaggtagatgaatcatgttgaagataatacccggtgcaactggatactttaataaaacactcaattcaaatcaattcgataatgaagatgcaatcaaagataaattagataatagaggttcaatcaaaggtaaattaaataatatatatggtaaatctattgattatgcagcgctgcgtcatcgggatataattattgcaaaaatagatttgtttattcaacgaatcacgcataatttatggcatgcacgtaaaaaaatgtgtttttaattgtgcaaataaatgatctcaaaatgtgggtcaataagtatattgacgattgcactgatgaggatttaaacgatcgtgactttattgcatcagttgttgaccgggctatttttcatttcgcgattaatagtatatgtaatcctggggataataaagatgcaatgcccattgaacaatgtacttttgatgtagaaactaagaatgaccttccctccacggttcagctattttatgaggaatctaaggataatgaacctttagcgaatatacattttcaagcaataggttctggttttttaacgtttgttaatgcctgccaggaacatgatgacaacagcttaaaattatttgcttcgctgttaatttcactttcatattctagtgcctacgcagatttatcagaaacagtgtatattaatgaaaataatgagagctacctgaaagctcagtttgaaaaattatctcaacgtgatatgaagaagtacctgggagagatgaagcgtctggctgatgggggagaaatgaattttgatggctatctggataagatgtcacatctggtgaatgaaggaacgctcgatcctgatattttaagcaaaatgcgagatgctgcaccacaattaattagcttcgcgaagtcgtttgacccaacctcaaaggaagagattaaaatacttacagacacttctaaattaatttatgatttgttcggggttaaatcggagaaataatatgtgaagttcttcgatagtatggaaggcattatataaaaggacccaatatttattgggttcttttttctctatcaatgctattagcagggagatatatcaccagagtttaatgtgtgattttttatttatcgtcgaacctggattgtttatcattggccttaacaaagttaacggctaataagattatttccatcacttcgtgagagcttcatgccttgagaggatctcaattttcttttgcaatgagacaggcgcttcctgttgttatggtatagtaccccgctattgagcctcctgaatagtgatgctgaataacataaccccatgatatatcgataaaataatctctacatttgaaaatgcacggtaattctgaaatgcaaaaaatcaaccaaaccagcgcaatgcctgaaaaaactgacgttcactggagtggtcggtttagcgttgcaccaatgctcgactggacggacagacattgccgctatttcttgcgtctgctttcccgcaatacgttgctgtataccgaaatggtgaccacaggggcgattattcacggtaaaggtgattatctggcgtacagtgaagaagaacatccggtagcgttgcaactgggcggtagcgatccggcggcgctggcgcagtgtgcaaagctggcagaagcgcgcggatatgatgagatcaacctgaatgtcggctgcccgtctgaccgggtgcagaacggcatgtttggtgcgtgtctgatgggtaatgcgcagctggttgccgactgcgtgaaagcgatgcgcgatgtggtgtcgattccggtgacggtgaaaacgcgtattggcatcgacgaccaggacagctatgaatttctctgcgatttcatcaataccgtttccggcaaaggcgagtgtgagatgttcatcatccacgcacgtaaagcctggctttcggggttaagcccgaaagaaaaccgtgaaatcccgccgctcgattatccgcgtgtgtatcaactgaagcgtgactttccgcatctgacaatgtcgattaacggtggtatcaagtcgctggaagaggccaaagcacacctgcaacatatggatggcgtgatggtcgggcgcgaggcgtatcagaatccgggtattctggcggcggtagaccgggagatctttggttcctcggataccgatgccgatccggtggcggtagtgcgcgccatgtatccgtacattgagcgtgaactcagccaggggacgtatctcggccatattacccggcatatgttgggcttgttccagggtattcctggcgcgcggcagtggcggcgttatttaagtgaaaatgcccataaagcgggtgcagacattaatgtgctggaacacgcgctcaaactggtggcggataagcgttaacttttcaccaaaaagtagtcaaattcaccacgccctgcgcaccgtcgcggggcgttttgctgttaaatcaatagattatttttggcatgattcttgtaatgccagcaagagatttcatatttgggagagcatcatgctggaactactttttgtgattggcttttttgtcatgctgatggtcaccggcgtttcgttgctgggcattatcgccgcgctggttgtggcgacggccattatgttcctcggcggtatgctggcattgatgattaagttgctgccgtggttactactggcgattgcggtggtgtgggttattaaggcgattaaagcaccaaaagtgccgaaatatcagcgttatgaccgctggcgttactaagggattgtgcggatgatcacaacctaaggttttatccttagaacaaaataggaattgataatcaaatctgtcactattgcgcctctaacagattcatcgtgctgtaccctacatacagccgaactataaaaagaaagggcttcccaggtggaagccctatttcttttatggaatcagcaggctggaaccttgcgtcgcccggctttccagaatctcatgcgcacgctgcgcatccttcagcggatatttctgctgctcggcgacatcgaccttaatcacaccgctggcaatcaaagagaacagttcattactggcctcggttaattcctcccgcgtggtgatatagccttgcagggaagggcgtgtcacatacaacgagcctttttgattgagaatgcctaagttcacaccggtaaccgcacctgatgagttgccaaaactgaccattaagccgcggcgttgcaggcaatccagcgaccgttcccaggtgtctctgcccacggaatcgtacaccacgcgcactttcttaccgccggtgatctcttttaaccgctcgaccagatcctcttcacgatagttaataacctgccacgcgcccgcttttagcgcgctctgcgctttttgcgcggttcctacggtgccgataagtttcgcgcccagggcttttgcccactggcaggcaattaagccaacgccgccagccgctgcgtggaacaggaactgttcatcgggtttaatttcataggttttgcgcagcagataataaaccgttaagcctttcaggaaggatgccgcagcttgctcaaaagaaattgccgcaggcagaatcgccgctttatccgcaataatgttatgcacagagctgtaagcgcctaacgccgactgcgcatagactacacgatcgcctgccttaatatgctttacaccactgccgactttactcacgatgcctgctgcttcggtgcctaatccgctgggtagcgatggcggcgggtaaaggccgctgcggatatatgtgtcgataaaattgatgccgatggctttattttcgacctggatttcattctccgccggatcggcaggagtgaactctacggcttgaagtacttccgggccaccgtgcttgtgaaattcaattcgtgttgccatgtgtcctccagaacgtatcgtcagggtctgcttcatatgataaagtttcgacccattctttatctcggtaactccattcactatggcaggaaataaacccttcaacaaacagcaggctgaaccccgcgaacgcgatccacaagttgccgggctgaaagtgcctccgcactcgatcgaagcggagcagtcggtgttgggcggtttaatgctagataacgaacgctgggatgatgtagccgagcgtgtggtagcagacgatttttacacccgcccacaccgtcatatctttactgaaatggcgcgtttgcaggaaagcggtagccctatcgatctgattactcttgcggaatcgctggaacgccaggggcaactcgatagcgtcggtggttttgcttatctggcagagctgtcaaaaaatacgccaagtgcggctaacatcagtgcctatgcggacatcgtgcgtgaacgtgccgttgtccgtgagatgatctcggttgcgaatgagattgccgaagctggttttgatccgcaggggcgtaccagcgaagatctgctggatctggctgaatcccgcgtctttaaaattgccgaaagtcgtgcgaacaaagacgaagggccgaagaacatcgccgatgtgctcgacgcaaccgtggcgcgtattgagcagttgtttcagcagccacacgatggcgttaccggggtaaacaccggttatgacgatctcaacaaaaaaaccgctggcttgcagccgtcggatttgatcatcgtcgccgcgcgtccgtcgatgggtaaaacaacatttgcgatgaacctcgtcgaaaacgcggcgatgttgcaggataaaccggtacttatcttctcgctggagatgccatcagaacagatcatgatgcgttctctggcgtcgctgtcgcgcgttgaccagactaaaatccgtaccgggcagctcgatgacgaagactgggcgcgcatttccggcaccatgggtattttgctcgaaaaacgcaatatctatatcgatgactcctccggcctgacgccaacggaagtgcgttcccgcgcacgccgtattgcccgtgaacacggcggcatcgggcttatcatgatcgactacctgcaactgatgcgcgtaccggcgctttccgataaccgtacgctggaaattgcagaaatctctcgctcgctgaaagcactggcgaaagaactgaacgtgccggtggtggcgttgtcccagttgaaccgttctctggaacaacgtgccgacaaacgcccggtcaactccgacctgcgtgaatctggctctatcgagcaggatgcggacttgatcatgtttatctatcgtgatgaggtgtatcacgaaaacagtgatttaaaaggcatcgcggaaattattatcggtaaacaacgtaacggcccaatcgggacggtacgcctgacctttaacggtcaatggtcgcgcttcgacaactatgcggggccgcagtacgacgacgaataataattattttatgaattaggtaattaaagcaaacacttatcaaggaacacaaatgcaagcggcaactgttgtgattaaccgccgcgctctgcgacacaacctgcaacgtcttcgtgaactggcccctgccagtaaaatggttgcggtggtgaaagcgaacgcttatggtcacggtcttcttgagaccgcgcgaacgctccccgatgctgacgcctttggcgtagcccgtctcgaagaagctctgcgactgcgtgcggggggaatcaccaaacctgtactgttactcgaaggcttttttgatgccagagatctgccgacgatttctgcgcaacattttcataccgccgtgcataacgaagaacagctggctgcgctggaagaggctagcctggacgagccggttaccgtctggatgaaactcgataccggtatgcaccgtctgggcgtaaggccggaacaggctgaggcgttttatcatcgcctgacccagtgcaaaaacgttcgtcagccggtgaatatcgtcagccattttgcgcgcgcggatgaaccaaaatgtggcgcaaccgagaaacaactcgctatctttaataccttttgcgaaggcaaacctggtcaacgttccattgccgcgtcgggtggcattctgctgtggccacagtcgcattttgactgggtgcgcccgggcatcattctttatggcgtctcgccgctggaagatcgctccaccggtgccgattttggctgtcagccagtgatgtcactaacctccagcctgattgccgtgcgtgagcataaagccggagagcctgttggttatggtggaacctgggtaagcgaacgtgatacccgtcttggcgtagtcgcgatgggctatggcgatggttatccgcgcgccgcgccgtccggtacgccagtgctggtgaacggtcgcgaagtaccgattgtcgggcgcgtggcgatggatatgagctgcgtagacttaggtccacaggcgcaggacaaagccggggatccggtcattttatggggcgaaggtttgcccgtagaacgtatcgctgaaatgacgaaagtaagcgcttacgaacttattacgcgcctgacttcaagggtcgcgatgaaatacgtggattaatcgttctgtaatatttgattgtctgtgccggatgcggcgtgaatgccttatccggccaataaaatcctaaaaattcaataagttgatgttctttcatgctcttataaaggtcgtgcctctggcggatgtacgtttgtcatgagtctcactctgttgctaattgccgttcgctcctgaacatccactcgatcttcgccttcttccggtttattgtgttttaaccacctgcccgtaaacctggagaaccatcgcgtgtttcaaaaagttgacgcctacgctggcgacccgattcttacgcttatggagcgttttaaagaagaccctcgcagcgacaaagtgaatttaagtatcggtctgtactacaacgaagacggaattattccacaactgcaagccgtggcggaggcggaagcgcgcctgaatgcgcagcctcatggcgcttcgctttatttaccgatggaagggcttaactgctatcgccatgccattgcgccgctgctgtttggtgcggaccatccggtactgaaacaacaacgcgtagcaaccattcaaacccttggcggctccggggcattgaaagtgggcgcggatttcctgaaacgctacttcccggaatcaggcgtctgggtcagcgatcctacctgggaaaaccacgtagcaatattcgccggggctggattcgaagtgagtacttacccctggtatgacgaagcgactaacggcgtgcgctttaatgacctgttggcgacgctgaaaacattacctgcccgcagtattgtgttgctgcatccatgttgccacaacccaacgggtgccgatctcactaatgatcagtgggatgcggtgattgaaattctcaaagcccgcgagcttattccattcctcgatattgcctatcaaggatttggtgccggtatggaagaggatgcctacgctattcgcgccattgccagcgctggattacccgctctggtgagcaattcgttctcgaaaattttctccctttacggcgagcgcgtcggcggactttctgttatgtgtgaagatgccgaagccgctggccgcgtactggggcaattgaaagcaacagttcgccgcaactactccagcccgccgaattttggtgcgcaggtggtggctgcagtgctgaatgacgaggcattgaaagccagctggctggcggaagtagaagagatgcgtactcgcattctggcaatgcgtcaggaattggtgaaggtattaagcacagagatgccagaacgcaatttcgattatctgcttaatcagcgcggcatgttcagttataccggtttaagtgccgctcaggttgaccgactacgtgaagaatttggtgtctatctcatcgccagcggtcgcatgtgtgtcgccgggttaaatacggcaaatgtacaacgtgtggcaaaggcgtttgctgcggtgatgtaatgcaggaaagcaggctggagctacccagcctgcagtgaaattaaactgtcgtcgctttcactctttctttatagatgatttttttgatgccatcgttctacgtgagagataataaacgttgttagttcttttattgttaagcttatcccaattatctggaattccttatcctgtttttttgggtggagtaataatttctgcacatctaaccattattaaatttaataataagtatcgggtttgttacgatagaatatttctatatcctcaagaatatgctttgccttattgcctgtgactttctgagattcaattatagtatcgttaaattctaatgttaaagagaactcttttttccgctttgtgtaagtttaaccttatattgattaccaatatcaaataaaaaggtcctgtaatgagaataatcacctttaacctcctcggcaaaacagcaaagcgtgcaaatatacataaagtctttcttacccctgattttgttaactaaatcaataaatgcgtgaaaaactttacttgcaatagaacttgatacttcttctccaggtctaaaaaatcttttgcaatttttaactgtgtttctatgtataaaaagaaatctttggcataagagatatctttattatttagtgcatctagctcaacaggtaaagatgtcgttttgttgctattcacatatgatatattcatatcatcatctccatcgcgagtaataaaattaatcaccattgtagggtagggggctggtcaatcagaaatcatctttataaacttcgattgtttttgtaatgctgtatcattaagttcattaaatcgtacagcagataaatgttctatcaaatttcgctcatttgccgaggattcatcataataaacgtaaaattaatgtatccttacatcgagtaataaacattttttatacaaaaaaagacaggaacgtatttactgggttaaatataatcatcctgcttttcatcacaaaaaccgcagataatccttcctttccccggcagctggcgttatggtcagatggtttttgcaacaaatctcacaataaaaagtttcaacatactgactatttagggaaaaatatgcgcaagatcacacaggcaatcagtgccgtttgcttattgttcgctctaaacagttccgctgttgccctggcctcatctccttcaccgcttaaccctgggactaacgttgccaggcttgctgaacaggcacccattcattgggtttcggtcgcacaaattgaaaatagcctcgcagggcgtccgccaatggcggtggggtttgatatcgatgacacggtacttttttccagtccgggcttctggcgcggcaaaaaaaccttctcgccagaaagcgaagattatctgaaaaatcctgtgttctgggaaaaaatgaacaatggctgggatgaattcagcattccaaaagaggtcgctcgccagctgattgatatgcatgtacgccgcggtgacgcgatcttctttgtgactggtcgtagcccgacgaaaacagaaacggtttcaaaaacgctggcggataattttcatattcctgccaccaacatgaatccggtgatctttgcgggcgataaaccagggcaaaatacaaaatcgcaatggctgcaggataaaaatatccgaattttttatggcgattctgataatgatattaccgccgcacgcgatgtcggcgctcgtggtatccgcattctgcgcgcctccaactctacctacaaacccttgccacaagcgggtgcgtttggtgaagaggtgatcgtcaattcagaatactgacagagcgggagagcgtgatgctctcccgaatgctgtttttttaatcacacctttatcctttcgctgtcttgctgcaaactgattaagagagttttatcaaggagcagcacatgtggtatcaaaagacgctcacgcttagcgccaaatctcgtgggtttcatctggtaacggatgaaattctgaatcagctggctgatatgccgcgcgttaacatcggcttactgcatctgttgctgcaacatacctccgcctctctgacacttaatgagaactgcgatcccaccgtacgccacgacatggagcgttttttcctccgcaccgttcccgacaacggaaattatgagcatgactatgagggagcagacgatatgccttctcatatcaaatcctcaatgctgggaacatcgcttgtattgccggtgcataaagggcgtattcagaccggcacctggcaaggcatttggctgggggaacatcgcatccacggcggatcgcgtcgcatcatcgcgacactacaaggggagtaaaaaatgaccatttcggagttgctacaatattgcatggcaaaaccaggcgcagaacagagcgtgcataatgactggaaagcgacgcagatcaaagtggaagatgtactgtttgcgatggtgaaagaagtagaaaatcgcccagctgtttcgctgaaaaccagcccggagctggcggagctgctacgtcagcagcacagcgatgtgcgtccaagccgccatctgaataaagcgcactggagcaccgtgtatctcgacggttcgctgccagattcgcaaatctattatctggtggatgcgtcttatcagcaggcggtgaatttactgccggaagaaaaacgtaaattgctggtgcaactctgaaaggaaaaggccgctcagaaagcggccttaacgattacagcatcggcttaaggaagcgtgccgtgtgtgatgcttcgcactccgcgacggtttctggcgtaccggagacgaggatctcgccgccaccactgccgccttctggtcccaggtcgacaatccagtcagcggttttgatcacgtcgagattgtgctcaatcaccacaatggtgttgccctgatcgcgcagtttatgcagtacgtcgagcagttgctgaatatcggcgaagtgcagaccggtggtcggctcgtcgagaatatacagcgtctgcccggtgccgcgttttgacagttcacgcgccagcttcacgcgctgggcttcaccgcctgaaagggtggttgcggactgccccagtcgaatgtacgtcaggccaacgtccatcaacgtttgcagcttacgcgccagtgcaggtacggcatcaaagaactcacgcgcctcttcgatggtcatatccagcacttcgtggatggttttgcctttgtacttaatctccagcgtttcacggttatagcgtttacctttgcactggtcgcacggcacgtagatatccggcaggaagtgcatctccactttgatcacgccatcgccctgacaggcctcgcagcgtccgccacgaacgttaaagctgaaacgtcccggcgtatagccgcgcgcacgggattccggtacgcccgcaaacagttcgcgcacaggcgtaaacacgccggtataggtcgccgggttagaacgtggagtacgaccaattgggctttggtcgatatcgatcactttatcgaaatgctccagcccctgaatatcgcgatacggtgctggttcggcgatggtcgccccattcaactggcgttgggcaatcgggaacagtgtgtcgttaatcagcgtcgatttaccggaacctgaaaccccggtgatgcaggtaaacagacccaccggcagcgtcagcgtcacgtccttcaggttgttgccgcgtgcgcctgtcagcttcagcactttttccggattcgccggaacgcgtttcttcggcacttcaatcttgcgtttgccgctcatgtactgcccggtcaacgactccggcaccgccataatcgcttccagcggaccttctgcgaccacttcaccgccgtgaacacctgcgcccgggccaatgtcgatcacatggtcagcggcgcgaattgcgtcttcgtcgtgctccaccacaatcacggtattaccgagatcgcgcagatggataagcgtacccaacaggcgctcgttatcacgctggtgcaggccgatagacggctcgtccagcacgtacataacgccaaccaggcccgcaccaatctggctcgccagacggatacgctgtgcttcaccgccagaaagcgtttctgccgagcgggaaagcgtcaggtaattcaggccgacgttaacgaggaatttcagacgatcgccgatctctttaaggattttttctgcaatcttcgcccgctgacctgcgagtttgagattgttgaagaattccatcgcatgaccaatgctcatgtcggagatagcaggcagcggcgtattctcgacatacacgtggcgcgcttcccgacgcagacgcgtcccttcgcagctggcgcacggacgattactgataaacttggctaattcttcgcgtaccgcgctggattccgtctctttatagcggcgctccatattatgcagcacgccttcgaacggatgacgacgaatggaggtatcgccacgatcgttcatgtatttgaattcaatgttttctttgccagaaccgtacaacaccactttatgcacgttcgcgctcaggctgccccacggcgcttcgacgtcgaacttatagtgatctgccagcgatttcagcatctggaaataatagaagttgcggcgatcccagccacggatcgcaccaccagccagcgacagttccggattctggatcactcgatcaggatcgaaatattgctgtacgccaaggccgtcgcaggtcgggcaggcccccgccgggttgttaaacgaaaacagtcgcggctccagttcacgcatactgtagccgcaaattgggcaggcgaagttggcggagaacagcagctcttccgctttcgggtcgtccatatccgccactaccgcggtaccaccggaaagctccagcgcggtttcaaatgactcggcaagacgttgggtaagatcgtcacgcaccttgaagcgatcaaccaccacttcaatggtatgtttcttttgcagttccagttttggcggatcggaaagatcgcagacttcgccatcaatacgagcacggatgtagccctggcttgccaggttctccagcgttttggtgtgttcgcctttgcgctctttaatgattggcgcgagtagcatcagacgcttgccttccggctgcgacagcacgttatccaccatctggctgacggtttgcgccgccagcgggacgtcgtggtccggacagcgcggctcgccaacgcgggcgaataacaaacgcaaatagtcgtggatttcggtgattgtccccaccgtagaacgcgggttatgagacgtcgatttctgctcaattgagatggcaggagaaagcccctcaatatgatcgacgtccggcttttccatcagtgacagaaactgccgcgcgtaggcggaaagggattcaacgtaacggcgctgcccttcggcatataaggtgtcgaaagcgagcgaggatttgccagaacccgaaagcccggtcacgacaatgagcttgtcgcgggggataacgaggttgatgtttttgagattatgggtgcgggcgccccgaacttcgatcttatccattcacctttcccggattaaacgcttttttgcccggtggcatggtgctaccggcgatcacaaacggttaattatgacacaaattgacctgaatgaatatacagtattggaatgcattacccggagtgttgtgtaacaatgtctggccaggtttgtttcccggaaccgaggtcacaacatagtaaaagcgctattggtaatggtacaatcgcgcgtttacacttattcagaacgatttttttcaggagacacgaacatggccagcagaggcgtaaacaaggttattctcgttggtaatctgggtcaggacccggaagtacgctacatgccaaatggtggcgcagttgccaacattacgctggctacttccgaatcctggcgtgataaagcgaccggcgagatgaaagaacagactgaatggcaccgcgttgtgctgttcggcaaactggcagaagtggcgagcgaatatctgcgtaaaggttctcaggtttatatcgaaggtcagctgcgtacccgtaaatggaccgatcaatccggtcaggatcgctacaccacagaagtcgtggtgaacgttggcggcaccatgcagatgctgggtggtcgtcagggtggtggcgctccggcaggtggcaatatcggtggtggtcagccgcagggcggttggggtcagcctcagcagccgcagggtggcaatcagttcagcggcggcgcgcagtctcgcccgcagcagtccgctccggcagcgccgtctaacgagccgccgatggactttgatgatgacattccgttctgatttgtcattaaaacaataggttatattgttttaaggtggatgattaaagcatctgccagccataaaaaagaagcctccgttatggaggcttctacgtatcaggtcaaaatcattggccattgtggcggtgtctgattcatctcttctatcatcaccgactcgatgttgtgccagatagcggtgatgtccgccattgtgatgccaagcaaccccattgcgaaccaacaggcggaaacaacgcccagaccgctgctgatcaccgcaagcccgacataatcagaccgacgaaaacggatgttgagtgtgctggccagaaacatcattacggcactaagaagttgccagcgaagaagaaccacgccagtggtgagggtagccatcaaacaattcctctgaaaagagccgatgccctggacagcgcggcgttgttcacgggaggcgtggtacactctggctatcgcggggcttgcagaacacaaaaatgaaacactctgtttgtttcattaattttgtgaactatatcacaattgattgtttgttagccatattaggccgtgacttttattgctgtacagattatgtggtttttcagtggcattaagggcatatcttcccgccgcctctgcattcctgtaggaaattaattttgaatatcaatgaattattttcatccaggtgacgattagaaaggtatcaatttcaaatcaggcaaaagtgctatttataccgtaagatttatctaaagacgtcggtacccagggttttcaccttgcaatggccgggtataaacaggcaggaaattgatagcaatgagtcatcgtgcacgacaccaattactggcgttgccgggcattatctttttagttctctttcccatcattctttcgctatggattgccttcctttgggcaaaatcagaagtgaataatcagctccgaacctttgctcaactggcactggataaatccgagctggtcattcgccaggcagatttagtgagcgatgcagctgaacgctatcaggggcaagtttgcactccagcccatcaaaagcgaatgttgaatattattcgtggctatctttatattaatgaattgatctatgcccgtgataaccattttttatgctcatcgctgatagcgcctgtaaacggctatacgattgcaccggccgattataagcgtgaacctaacgtttctatctattattaccgcgatacgccttttttctctggctataaaatgacctatatgcagcggggaaattatgtggcggttatcaaccctctcttctggagtgaagtgatgtctgatgacccgacattgcaatggggtgtgtatgatacggtgacgaaaacctttttctcgttaagcaaagaggcctcggcagcaacgttttctccgctgattcatttgaaggatttaaccgtacaaagaaatggctatttatatgcgacagtttattcgacaaaacgcccaattgcagccattgttgcgacttcatatcaacgtcttataacccatttttataatcatcttatttttgcgttgcccgccggtattttggggagtcttgttctgctattactctggctacgtattcgacaaaactatttatctcccaaacgtaaattgcaacgcgccctcgaaaaacatcaactttgtctttattaccagccaataatcgatatcaaaacagaaaaatgtatcggcgctgaagcgttgttacgttggcctggtgagcaggggcaaataatgaatccggcagagtttattccgctggcagaaaaggaggggatgatagaacagataactgattatgttattgataatgtcttccgcgatctgggcgattacctggcaacacatgcagatcgctatgtttctattaacctgtcggcctccgattttcatacgtcacggttgatagcgcgaatcaatcagaaaacagagcaatacgcggtgcgtccgcagcaaattaaatttgaagtgactgagcatgcatttcttgatgttgacaaaatgacgccgattattctggctttccgccaggcaggttacgaagtggcaattgatgattttggtattggctactctaacttgcataaccttaaatcattgaatgtcgatattttgaaaatcgacaaatcgtttgttgaaacgctgaccacccacaaaaccagtcatttgattgcggaacacatcatcgagctggcgcacagcctggggttaaaaacgatcgctgaaggcgtcgaaactgaggagcaggttaactggctgcgcaaacgcggcgtgcgctattgccagggatggttctttgcgaaggcgatgccgccgcaggtgtttatgcaatggatggagcaattacccgcgcgggagttaacgcgcgggcaataaaattacaggcggtggcgataatcgctgggagtgcgatcaaactgccgacggaaaacgcgggagaaggtctgctgcgagacataacccaggtccattgcgatatcaaaaatcggacgctcggtggtgcgcaactctacggcggccagtaacaggcggcgttggcgaatgtaatcgccaagcgtctgatgcgtcaccgtgcggaacattcgttgcaagtaccactttgaatagcctgatttttttgcgactacatcaatgttaagcggctggtcaatatgctcgtcaatccatgcgataagatcctgaataattttctgatgggacataaatctgcctcttttcagtgttcagttcgttaattcatctgttggggagtataattcctcaagttaacttgaggtaaagcgatttatggaaaagaaattaccccgcattaaagcgctgctaacccccggcgaagtggcgaaacgcagcggtgtggcggtatcggcgctgcatttctatgaaagtaaagggttgattaccagtatccgtaacagcggcaatcagcggcgatataaacgtgatgtgttgcgatatgttgcaattatcaaaattgctcagcgtattggcattccgctggcgaccattggtgaagcgtttggcgtgttgcccgaagggcatacgttaagtgcgaaagagtggaaacagctttcgtcccaatggcgagaagagttggatcggcgcattcataccttagtggcgctgcgtgacgaactggacggatgtattggttgtggctgcctttcgcgcagtgattgcccgttgcgtaacccgggcgaccgcttaggagaagaaggtaccggcgcacgcttgctggaagatgaacaaaactaaagcgccacaagggcgctttagtttgttttccggtctttgtctttctctctatcccgctggtacacaggagggtttcccccgacgtcaacacacctcattcgagcacgtggtggaggttccggttggtgttgatgctttaattgtatgtcaccgacgtttcttcgccagtgtaaaagtatactttttaaccgcaatatttttgtcatctcagacgattttttatcgcaatcctgaacggtatacggctcgataacgctgcaatcttgcgcaccgacgataacgtttgcgcatcaattgcctggtttttcatcgtcaagacaataaaagagaaaaaagcagcaaacttcggttgaaaaagccgctatgatcgccggataatcgtttgctttttttaccacccgttttgtatgcgcggagctaaacgtttgcttttttgcgacgcagcaaattgtcgcaaacctggagcaggaagataacgtttcgctggcaggggattgtccgccacgcatcttgacgaaaattaaactctcaggggatgttttcttatgtctacgccatcagcgcgtaccggcggttcactcgacgcctggtttaaaatttcacaacgtggaagcactgtccgtcaggaagtggttgccgggttaacaacgtttctggcgatggtctactcggtcatcgtcgttccaggtatgttgggtaaagcaggcttcccgcctgcggcagttttcgttgcaacctgtctggttgccggactcggttctatcgtgatgggtctgtgggctaatctgccgttggcgattggttgcgccatctccctgacagcgtttaccgcattcagcctggtgctggggcaacatattagcgtacctgtcgcgctgggtgccgtgttcctgatgggtgtgctgtttacggtaatttctgccacgggtatccgtagctggattttgcgcaacttgcctcacggtgtggcgcacggcacggggattggtatcggtctgttcctgctgctcattgccgctaacggtgtcggtctggtgattaaaaacccgcttgatggtctgcccgttgcgctgggtgatttcgcgaccttcccggtgattatgtcactggtaggtctggcggtgatcatcggcctggaaaaactgaaagtccctggtggcattctgctgaccattatcggtatctcaattgtcggtttgatcttcgatcctaacgtccatttctccggcgttttcgccatgccttcattgagcgatgaaaacggcaattcactgattggcagcctggacattatgggcgcgctgaatcctgtagtcctgccaagcgttctggcgctggtgatgacggcagtatttgatgccaccggaactatccgtgccgtcgccggccaggcgaacctgctggataaagatgggcagatcatcgacggtgggaaagcactgaccactgactccatgagcagcgttttctctggcctggtgggtgcggctccggcagcggtatacatcgagtctgcggcgggtacggcggcgggcggtaaaaccggtttgacggctatcaccgttggcgtgctgttcctcctgattctgttcctctctccgctctcttacctcgttccggggtatgcaacggctccggcgctgatgtacgttggcctgctgatgctgagcaacgtggcgaaaatcgactttgctgattttgttgatgcgatggcgggtctggttacggctgtattcatcgtgctgacctgtaacatcgtaacaggcatcatgatcggcttcgcgactctggtgattggtcgtctggtttccggcgaatggcgcaagttgaacatcggtacggtcgttatcgccgtggcgctggtgaccttctatgcgggtggctgggctatctaatctttcatcggattctgaaaacgggtggcaatggctgcccgtttttattttctccgcacattgtgtgagcttttgcgatattctgaaaaaatgagaattcaggcataacgtctttctcagatcataaaaaacatcgcaaacagggaacgcatggaaatcttcttcaccatactgataatgaccctcgtggtctcgctgtccggggtggtcactcgtgtcatgccctttcagatcccgcttccgcttatgcaaatcgccatcggtgcgctactggcgtggccgacgtttggtttgcatgtggagtttgatcctgaactctttttagtcttgtttatcccgccgttgctgttcgctgatggctggaaaacgccgacccgtgaatttctcgaacatggtcgagagattttcggcctcgcgctggcgctggtggtggtcaccgtggtcggcattggcttccttatttactgggtggtgccgggcattccgctgatccctgcctttgcgctggcggcggtgctttctccgaccgatgctgtggcgctctccgggattgttggcgaagggcgcatcccgaaaaaaatcatgggcattttgcagggcgaagcgttgatgaatgacgcctccggtctggtgtcgttgaagtttgccgtagcagtggcgatggggacgatgatcttcaccgtcggcggtgcgacggtcgaatttatgaaagtagccattggcggtattctcgccggttttgtggtgagctggctgtacggtcgctcgctgcgattcctcagccgctggggcggtgatgaacccgcgacgcagatcgtcctgctgttcctgctgccattcgcttcttatctgattgccgaacatattggcgtttccggcatcctcgctgcggttgccgccgggatgaccatcacccgctccggtgtgatgcgccgtgcgccgctggcaatgcgcctgcgtgcaaacagcacctgggcgatgctggaatttgtctttaacggcatggtgttcctgctgttaggtctgcagctgccgggtattctggagacgtcgctgatggcagcagaaatcgaccctaacgtcgaaatctggatgctgtttaccgatattattctgatatatgcggcgctgatgctggtccgtttcggctggctgtggacgatgaaaaagttcagcaaccgcttcctgaagaagaagccgatggagtttggttcgtggaccacacgagaaatcctgatcgcgtctttcgccggggtgcgtggggcgatcactctggccggtgtgctctctatcccgctgctcttgccggatggtaacgtcttcccggcgcgctatgagctggtgttcctggcggctggcgtcattctcttctcgctgtttgtcggcgtggtgatgttgcctattctgctacaacacattgaagtcgcggatcattcgcaacaattgaaagaggaacgtattgcgcgagcggcaacggcagaagtggcgattgtggcgatccagaaaatggaggagcgtctggcggcggataccgaagagaatatcgataaccagctgcttacggaggtcagttctcgcgtcattggtaacctgcgtcgtcgcgccgatggacgtaacgacgttgaaagttccgtgcaggaagagaaccttgagcgtcgcttccgtctggcggcattgcgttctgaacgtgctgaactttaccacctgcgcgccacacgggagatcagcaacgaaacgctgcaaaaattactgcacgatctcgatttgcttgaagcgttgctaattgaggaaaatcagtaagccgaaagcgacgtaaccaggcccgaggtaatctgaaaaaggtgcaatcttttgcacctttaacaggttagctcgggctaacattcatgattctaaaacaaataagttatctctcttttaaagtcaattcattggctgttcttcgacttaacctcaatctgcatcttgcataatatctgcagtaatcttcatagcgactgcatgaagattatcctcagtttgtgacatgccagtatgagtggcacaatcttcttcaaagaatttctgtagtgttaccaggatatcactattaatggagatattttcctcaccacggagaatggtaatacccattccctggacgctagcctcatcgaaattaacacgatagagacggatattaaacatccaggcttttgttaaaacagaacagttgaaatggcaattgcttaaattggcattattaaaattaacattagccatattagagccggtacatataaccatttcgaggaacgtatttgttaaccgcgtaaaaaagagtttgctatcaattaagtttatattctggagggttgctttattcaggttgacacgagacagatcagcatgttcaaagttaattaaatcaagtttagagaagctaaggtcggctctaaataaattaatatatggcgctattactttataaagatttacctcagccatgtatgccatataaaaatttgaataatcaaggaaggtatttttaatattggctctattcattgttgcattgtagaattgaacatgcatagcggaacatgaatttagagttccgtcagtcatttttatctgagcgaaatttgagtcatcgagaatacaattatcaaaaagtattttttccattatggcgaaattaaaattcgttttatacatattacagtcctgaaaaatagcgttttgtagtctgcaacctgcaaaattcgaattggataaatcttcatctttaatcacgatacctttcaggctaaggtgtgaaaaatcgtaaccaccatttactgtctgtgggattttgatagtattattatggacggtgacattatttataaaatataccaccttaattgacacttccttatctttattaaggtaaactcttctcgtaattctatcgtcacatttattatttgcatgtgaagctatatctataaaatatttatgtattttcctgtccgtttctttcgtgatttttcctgatggtaaactatcataaattcttttcattttctgaatcaagcctatcactttttcatgatcatccattttgaaaagagagagggctttattgtcaattaacgtgtttttatgatgtttgctgtaattatctgattttgttttctttgtatgtgatggacttgtgacagagtggttatcgttaatcaggcaaagagggaaaaacatattatttaaaccattatagcgcataaaatatccttataattaacaagaaagaaaaggcatattctctgcattatcattttctacgactgtcaaaaatcgctcattttttaatgagtttatttgtttaatattatgggaaaaggtgatgcatttgggagaggaagagtattccccggtcagacgaccggggaaggggagagattaatgcgcgcggccttgctcaacgccaaagccggtctgggagcggataaactgcgcgcggaacagttcacgctcacgcgcgccttccgctgagttatcggttgccgagaagaaccagatgccgaggaatgccacggtgatagagaacagcgccgggtattcatacgggaagatggctttttcgtgaccaaggatctgtacccaaatcgtcgggccgaggatcatcagtactactgcggtaatcagccccagccagccacccatcatcgcgccacgcgtggtcagtttcgaccagtacatagaaagcagaatgatcgggaagttacagctcgccgcgatggcaaacgccagccccaccataaaggcgatgttctgattctcaaacagcacgccgaggataatcgcaatcacgccgaggatcagtacggtgatttttgatacccgcagctcttcacgttcggtcgcgccttttttgaagacgttagcgtacaagtcatgcgaaaccgcggatgcgcccgccagcgtcagacccgcaaccaccgcgaggatagtggcgaaagcaaccgctgaaataaaaccgaggaacaggttgccgcccactgcattcgccaggtgaacggccgccatgttgttaccaccaatcagatggcccgccgcgtctttatattccggattcgcaccaaccagcatgatcgcgccgaagccgataataaaggtcagaatatagaagtagcccataaacccggtggcgtagaacacgctcttacgtgcttcgcgggcatcgctgactgtaaagaagcgcatcagaatgtgcggcaagcccgccgtaccaaacatcagtcccagacccagagagagcgcggagatcggatctttcaccagcccgcccggcttcatgatgtcgacacctttcgggtgtaccgccatcgcttcactgaacagattgttgaagctaaagccgacgtgtttcatcaccataaaggccataaagctggcaccgaacagcaacagcacggctttgataatttgcacccaggtggtcgccagcatgccgccgaacaggacgtacatcatcatcagcacgccgaccagcaccaccgcaatgtgatagttaaggccaaacagcagctcgatcagtttacctgcgcccaccatctgggcgataaggtaaagcgccaccaccaccagagaaccacaggccgaaagaatacgaatcggcccttgtttcagacggtaagaggccacatcggcaaaggtgtagcgccccaggttacgcagacgttcggcaatcaggaacaaaatgatcggccagcccaccaggaagcccagcgagtaaattaagccgtcatagccggaggtaaacaccagcgcggagatccccaagaatgaggcggcggacatatagtccccggcaatcgccagcccgttctggaagccagtgatattgccgcctgcggtgtagtagtcgctacgagaacgtacgcgttttgatgcccagtaggtaatgccgagcgtaaacacgacgaaaatcaggaacataataatcgcctgccagttcgttggctggcgctctacggccccgctaatagcatccgcggcgttagctgcgaaagggagtgtggcggcaagcgccgtcagaactcttttcatgatgcttgtacctcatgcaggacttcattattaagacggtcgaattcgccgttcgcccgccagatgtagataccggtgagaacaaaggagatcacaatcactccaacaccaattggaataccgcgtgtgacgctggtgttcggattcagcggcgtgcccagccagccgggcgcgaaggcgatcagtaaaataaagccgatataaactgccagcataataatcgacaggatggtggcaaaccgttgccgtttttcgactaactccctgaaatgcgcattgtcttctatccgctgataaatagtgccattcatcacagattctccagaggtaatgtagggattgttttaattcccgctcccttatgggagaaggttaacgctcgggtaacccttgccgaatgtaggccggataaggcgtttacgccgcatccggcaatcaatgcctgatgcgacgctgtcgcgtcttatcaggcctacaaaccgttaccgactcgcatcgggcaattgtgggttacgatggcatcgcgatagcctgcttctcttcaagcagcttctcgactacgccaggatcggcaagcgtcgaggtatcgcccaggttgctggtatcgcccgccgcaattttgcgcagaatacggcgcataattttgccggagcgggttttaggcagggagtcggtccagtgcagcacgtctggcgtcgccagcgggccaatctctttacgcacccagttgcggacttctgcgtacagttctggtgacggttcctccccgtgattaagcgtgacgtaggcgtagatcgcctgacctttaatattgtgcggaatacctactacggcggcttcggcaatcttcggatgcgccaccagcgccgactcaatctctgccgtccccagacggtgaccggagacgttcagcacgtcgtccacacgcccggttatccagtaatagccatcttcatcgcgacgcgcgccgtcgccgctgaaatacatatttttgaaggtggagaagtaggtctgttcaaaacgttcgtgatcgccaaacagcgtacgcgcctgacccggccaggagtcggtgattaccaggctaccttcggtggccccctccagcgggttaccttcgttatcgaccagcgccggttgcacgccgaagaacggacgtgttgccgaaccggctttcagctcggtagcgccaggcagcggggtgatcatgaaaccgccggtttcggtctgccaccaggtatcgaccaccggacatttctcgttgccgatttttttccagtaccactcccacgcttccgggttaattggctcgcccacggaaccgagaatgcgcagcgacgaacggtcggtgccttcgatcgctttatcgccttccgccatcagcgcgcggatcgccgtgggtgcggtatagagaatattgacctgatgcttgtccaccacctgcgccatacgggcaggcgtcggccagttgggtacgccttcaaacatcagcgtggtcgcaccgcaggccagcgggccgtacagcaagtaactgtgtccggtcacccagcccacatcggcggtgcaccagtagatatcacccggatgataatcaaagacatatttaaaggtcagcgccgcgtacaccagataaccgccggtagtatgcagcacaccttttggcttaccggtagaaccggaggtgtagagaataaacagcggatcttcggcgttcatctcttccgcctggtgctgatcgctcgcttgctcaaccaggtcgtgccaccacaggtcgcgcccttcctgccagtcaattttcccgccagtacgcttcagtaccaccacatgctctacgctggtgacgttcgggtttttcagcgcgtcatcaacgtttttcttcagcggaatactgcgcccggcacgcacaccttcgtcggaagtgatcaccagtcgtgagttggaatcaataatgcgcccggcaacggcttccggcgagaagccgccgaaaatcaccgaatgcaccgcgccaatgcgggcgcaggccagcatcgcaaccgcggcttccggcaccatcggcatataaatcgccaccacatcaccttttttaatgcccagctcgagcagggtattggcgaagcggcagacgtcgcggtgcagctctttatagctgatatgtttgctctggctggcgtcgtcgccttcccagatgatggcggtacgatcgccgttttcttgcagatggcggtcaaggcagtttgccgccagattcagcgtgccgtcctcgtaccatttaatggacacattaccgggggcaaaggaggtgtttttcaccttctggtaaggtttgatccagtcaagaatttttccctgttcgccccagaaggtatcaggtacgttaatagattgttgatacatcgcctcgtactgctgagggtttatcaggcaacggtctgcgatgttggcaggaatggtgtgtttgtgaatttggctcatgcttttgttctccttgtaggatgttaataatatgtggcataagcgttaaatgtaggggtattggcagttttgtttagtatttgggcgacagatcacgcaaaagtagaattgtgcaaataaacggcagggtaatttttgaaggtcagcaacaaaagttgattaattctttgaggaacatgcagttatgcatgctgttgaaaaagaggaagatactgactaactctaaagtggtattttacatgcacttacaattgattaaagacaacattcacagtgtggttatttgttacacataggggcgagcaatgtcatgacagtgtaggtgcggttactgtcgtgaaaaacaataaaaaccgccattgcaacaatggcgcaattcggatgaagcccctatgacaaggataaaaataaacgcacgccgtatcttcagcttattgattccttttttctttttcacttctgttcacgctgaacaaacggctgctcccgcaaagcctgtaactgtggaagcgaagaatgaaacctttgccccgcagcatcccgatcaatatctctcctggaaagccacctcggaacagtcagagcgtgttgacgccctggcggaagatccacggctggtgatcctgtgggcggggtatcccttctcgcgcgattacaacaagccgcgtggacatgcttttgctgtgaccgatgtgcgtgaaaccctgcgtaccggtgcgccgaaaaacgctgaagatggtccgctaccgatggcatgctggagttgtaaaagcccggatgtggcgcgtctgatccagaaagacggcgaagatggctacttccacggtaaatgggcgcgcggcggtccggaaatcgtcaacaacttaggttgtgccgattgccataacaccgcctctccagagttcgccaaaggcaaaccggagttaaccctttcccgtccgtatgcggctcgcgcgatggaagccattggtaaaccttttgagaaagccggacgtttcgaccagcaatcgatggtttgcggtcagtgccatgtggagtattacttcgacggcaaaaacaaagcggttaaattcccgtgggatgacggcatgaaagtcgaaaatatggagcagtattacgacaaaattgccttctctgactggactaactccctgtcgaaaacgccaatgctgaaagcgcagcacccggaatatgaaacctggacagcgggcattcacggtaaaaacaacgtgacctgtatcgactgccatatgccaaaagtgcagaacgccgaaggcaaactctacaccgaccataaaattggtaatccgtttgataacttcgcccagacttgtgcgaactgccatacccaggacaaagctgccttgcaaaaagtggtcgcggaacgtaagcagtcgattaacgacctgaaaatcaaggttgaagatcaactggttcacgctcacttcgaagcgaaagcagcgctggatgcaggcgcgacggaagctgaaatgaagccaattcaggacgatatccgtcatgcccagtggcgctgggatctggcgatcgcttcccacggcattcatatgcacgcaccggaagaaggtttacggatgctcggtacggcgatggataaagcggcggatgcacgcaccaaactggcgcgcctgctggcgaccaaaggcatcacccatgaaatccagatcccggatatctcaaccaaagagaaagcccagcaggccattggcctgaacatggaacaaatcaaggccgagaagcaggacttcatcaaaacggtgatcccgcagtgggaagaacaggcacgtaaaaacggtctgttaagccaataaccccgttccgcctcgcaaggggcggaaaacacaatggagtgaatatgagcgtattacgttcgttattaactgccggggtgctggcgtcgggcctgttgtggagcctgaacggaattaccgctacccctgcggcgcaggcatctgatgatcgctacgaagttacccagcagcgtaacccggatgccgcctgtctggactgtcataaaccagataccgaaggtatgcatggaaaacatgcttccgttatcaacccgaataacaaactgccggtcacctgcaccaactgtcacggccagccatcaccgcaacaccgcgaaggggtgaaagatgtgatgcgctttaacgagccgatgtacaaggttggagagcagaacagcgtctgtatgtcctgtcatctgccggaacagttgcaaaaagcgttctggccgcacgatgtccacgtaaccaaagtggcgtgcgccagctgccattccctgcatccacagcaagatacgatgcagacgttaagtgacaaaggacggattaagatttgcgtcgattgccacagcgatcagcgcaccaatccgaactttaacccggcgtctgttccgttgcttaaggagcagccatgacctggtctcgtcgccagtttctcaccggcgtcggcgtgctggcagccgtcagcggcaccgcagggcgcgtggtggcgaaaacgttgaatatcaatggggtgcgttacggcatggtgcatgacgagtcgttatgcatcggctgtaccgcctgtatggatgcttgtcgggaagtgaacaaggtgccggaaggcgtctcgcgcctgacgattattcgtagcgagccgcagggcgaatttcctgatgtgaaatatcgcttcttccgtaagtcttgccagcactgcgatcatgcgccgtgcgttgacgtctgcccgaccggtgcgtcttttcgcgatgctgccagtgggattgtcgatgttaatccggatctctgcgtcggttgtcagtactgcatcgccgcctgtccgtaccgcgtgcgctttatccatccggtcacgaagacggcggacaaatgcgatttctgccgtaagaccaatttgcaggccggtaagttgcccgcgtgcgttgaagcttgcccgaccaaggcgctgacgtttggcaatctggacgatcccaacagtgagatttcgcaactgctgcgccagaagcccacttaccgctacaagctggcgctgggaaccaaaccgaagctgtaccgcgtaccgtttaaatacggggaggtgagccaatgacgcagacttccgcatttcattttgaatcgctggtgtgggactggccgattgccatctacctgtttttgattggtatttctgctggtctggtgacgctggccgtgctgttacgtcgcttctacccgcaggcgggcggtgcagacagtacgttgctgcgcaccacgctgattgtcgggccgggcgcggtgatcctcggtctgttgatcctcgtcttccacctgacaagaccgtggaccttctggaagctgatgttccactacagttttacctcggtgatgtcgatgggggtgatgctgtttcagctctacatggtggtgctggtgctgtggctggcgaaaatctttgaacatgatttgcttgccctgcaacaacgctggttgccgaagctggggatcgtgcaaaaggttctgagcctgctgacgcccgttcatcgcggactggaaacattgatgctggtgctggcggtgttgttgggggcttataccggctttctgctgtcggcgctgaaatcgtatccgttcctcaataacccgatcctgccggtgctgttcctcttctccggcatctcgtccggtgcggcggtggcgctgatcgccatggcgatacgccaacgcagtaacccgcattccacggaagcgcagtttgtacaccgtatggaaatccctgtggtatggggtgaaatcttcctgctggtggcgttttttgtcggtctggcgctgggcgatgacggtaaagttcgtgcgctggtggcggcattaggtggcggtttctggacgtggtggttctggcttggtgtcgccgggctggggctgattgtgccaatgctgctcaaaccgtgggtcaatcgcagttccggcattcctgccgtgctggcggcgtgtggggccagtctggtcggcgtgttgatgctgcgctttttcattctctacgccggacagttgacggtggcgtaagccagaaaagaggtggtttctggacgtattccttcctgaagtcggttttctggcgttgttgttaagtctcggggtcaacgtgttgaccccgttgacggccttcgcgggagtgcggttgcgctggcctgccatgatgcgactcacttgcatcggcattctggcgcagttcgcgctcctgctgctcgcctttggcgtactgacgtattgttttctcatcagcgatttctcggtcatttatgtcgcgcaacatagctatagcctgctgtcgtgggaactcaagctggcagcggtgtggggcggccatgaaggttcgctgctgctttgggtgctgctgctttccgcctggagcgcgctgtttgcctggcattatcggcagcaaaccgatccgctatttccgctgacgttagccgttttatctctcatgctcgccgcactgctactgtttgtggtgctgtggtccgatcccttcgtgcggatatttccaccagcaatcgaaggccgcgatctcaatccgatgctgcaacatcccggtcttatctttcatccaccgctgctttaccttggctatggcggtttgatggtagcggcgagcgtggcgctggcgagtctactgcgcggcgagtttgatggtgcctgcgcccgaatttgctggcgctgggcgttacctggctggagtgcattaacggcggggatcatcctcggttcctggtgggcctactgcgaactcggctggggcggctggtggttctgggatccggtggaaaacgcctctttattaccctggctttctgccactgcgctgctgcacagtttgtccctgacacgccagcgggggattttttgccactggtcgctgttgctggcgatagttactctgatgctgtcgctgctgggcaccttaattgtccgttctggcattctggtttcggttcatgcgttcgcgctggataacgtccgcgccgtgccgttgttcagcctgtttgcactgattagccttgcgtctctggctctgtatggctggcgagcgcgggacggtggcccggcggtgcatttttcggggttatcgcgggaaatgttaatcctcgctacgctgttgctgttttgcgcagtgctactgatcgtgctggtgggaacgctttatccgatgatttacggcctgctgggctggggacgcctctccgttggcgcgccgtattttaaccgcgcgacgttaccgtttggtctgttgatgctggtggtgattgtgctggcgacgtttgtctctggcaaacgcgtgcagcttccggcgctggtagctcatgcgggcgtgctgttatttgccgctggggtcgtggtctccagcgtcagccgtcaggagatcagcctgaatttacagccgggtcagcaggtgacgctggcaggatacaccttccgttttgagtgcctcgatctacaagccaaaggcaattacaccagcgaaaaagcgatagtggcactgtttgaccatcagcaacgcattggtgaactgacgccggagcggcgtttttatgaagcacgccgtcaacaaatgatggaaccgtcaattcgctggaacggcatccatgactggtatgcggtcatgggggagaaaactgggccggatcgttacgcttttcgtttgtatgtacaaagcggtgtgcgctggatctgggggggaggattgttgatgattgcgggcgcattgttaagcggatggcgggggaagaagcgcgatgaataaagggcttctcacgctactgctgttatttacctgttttgcgcacgctcaggtcgtagacacctggcaattcgccaatccgcaacaacagcaacaggcgttaaatattgccagccagttacgttgtccgcagtgccagaatcaaaacttactggaatccaacgcgccggtggctgtcagtatgcgccatcaggtttacagcatggtggcggaggggaagaacgaagtcgaaatcattggctggatgaccgaacgctacggagattttgttcgctataacccaccgttaacgggtcagacgctggtgttatgggcgctgccagtggtgttgttactgctgatggcactgatcctctggcgagtgagggcgaagcgatgaaacagcccaaaataccggtgaaaatgctgacaacactcacgatattgatggtatttctctgtgtcggcagttatctgttaagcccaaaatggcaggcggtacgtgcggagtatcagcgtcagcgcgatccgctacatcagtttgccagccagcaaaccccggaagcgcagcttcaggcattgcaggataaaatccgcgctaatccacaaaacagcgaacagtgggcgttactgggcgagtactatctgtggcaaaacgattacagcaattcgttgctggcgtaccgtcaggcgttgcaactacgtggtgagaacgctgaactgtatgcggcgctggcgacggtgctttattaccaggccagccagcatatgaccgcccagactcgcgcaatgatcgacaaagccctcgcgctggacagtaatgaaatcaccgccctgatgctgctggcttccgatgcgtttatgcaggcgaactacgcgcaagccatcgaactatggcaaaaagtgatggatctcaactcaccgcgagttaaccgaacacagctggttgagtcgattaatatggcgaaattgttgcagcggagattggattaatcatctggtgatgaagattatgtcattgagctgcataaaaaataatcgaatgaacatatgccaaaaataatcactaatcagtattattgcagattaaacaaataaaaatctttccataacaaatggttattcattaatcctgccataaactcgcgttattatgcattaatgcagcgaaaagctctgttgttaaagggttgcgcaacataccgcgcaaatgatactgatcataagcgttaaaaaaatctacaaaccaacgcaacacaattcatgccctggcagtatgtcacgttctcgcgtttctgaacggggaacggcgctccattgaggaagtcattcatatgaaaaatataaaattcagcctggcctggcagattctgtttgctatggtgctgggcattctcctgggaagctacctgcactaccatagcgacagccgcgactggctggtcgtcaatttgctctctccggcgggtgatatcttcatccatctgattaaaatgattgttgtgccgattgtgatctccacgctggtggtgggtatcgcgggtgttggtgatgccaaacagctcgggcgtattggcgcgaaaaccattatctacttcgaggtgatcaccaccgtcgccatcattttggggatcactctggcgaacgtcttccagcccggtgccggggtggatatgtcgcagttggcgaccgtcgatatctcgaaatatcagagcactacggaagcggtacaaagcagttcccacggcattatgggcacgattttgtcgctggtgccgacgaacattgtggcgtcgatggcgaaaggcgaaatgctgccgatcatctttttctcggtgctgtttggtctggggctttcttccctgcccgcgacgcatcgtgaaccgctggtgaccgtgttccgctccatctctgaaaccatgtttaaagtgactcacatggtgatgcgttatgcaccggtgggtgtgtttgcgctgattgcggtgacggtggctaactttggtttctcgtctctgtggccactggcgaaactggtgctgctggtgcatttcgccattctgttcttcgcgctggtagtgctgggaattgtggcgcgcctgtgcgggttaagcgtctggatcctgattcgtattctgaaagatgagctgattctggcgtactccactgccagctctgaaagcgtgctgccgcgaattattgagaagatggaagcctacggagcaccggcgtcgatcaccagtttcgtggtgccgaccggttactcttttaaccttgatggttcgacgctgtatcaaagtattgccgctatcttcatcgcgcagttgtatggcattgacctgtccatctggcaggaaatcattctggtgctgacgctgatggtgacctcgaaagggattgctggcgtgcctggcgtgtcgtttgtggtgttgctggcaacgctgggtagcgtaggtattccgctggaaggtctggcgtttattgctggtgttgaccgtatcctcgacatggcgcgtactgcgctgaacgtggtgggtaatgcgctggcggtgctggtgattgccaagtgggaacacaaatttgaccgtaagaaagcgctggcttatgagcgtgaagtgctgggcaaatttgataaaactgcggatcaataattgaagattgccggggatatccacccggcaatgtgtgaatgcctgatgcgacgcttgccgcgtcttatcaggcctacgccagacagcgcaatagcctgatttagcgtgattttgtaggtcggataaggcgtttatgccgcatccgacatcaacgcctgatgcgacgcttaacgcgtcttatcaggcctacgccagacagcgcaatagcctgatttagcgtgattttgtaggtcggataaggcgtttacgccgcatccgacatcaatgcctgatgcgacgcttgccgcgtcttatcaggcctatcttaaccgttggttaatttttcaaactcttcacacccggtatcaaacccttccatacagctcaggttcaaccagtgcagcgccttttgcttgttcttctcgataaaaccttcttcaccgtttaagaacatcattcccgcccagtactcggaataaccggttcgggaaattgcagagctgcgtttgaaataccaggttgccttgtcatcgtcggccttaatgcccacgccgttggcgtaaatcaaaccaagcagcatttgggcatcgacggcagagtcgttctccagatcttccgaggcgttttctaacagcgaaattgcctttggataatccggtttacccgcttgagtatttaccagaatatgcgccagcgttacttcaccttctttactgcccgcttgcgccgctttctctgcaagaacttttgcttgtggatagtccagactgaccggattggtgattttgatctgcgccagcagcgcgcaggcatcagcatcaccgctgtcggcggctttctgtgcccaatattcggctttgctcaaatcgccggagctaaaccagctgtcggcaagaaaatattgtgcgcgtcggtccccggcctctgctgcctttaaatactggctgccaggctcggagtcgttggcgtgggcaaagaatgtcaaaaacaacatcaatgcgataatttttttcattttgataatacgattgggtagggagtaaccagtataaagagttcgaatggataaaaaaacagcctccgaaaggaggctgtagaaaggacggtattacgccagtgccgcttcgcgcaggcgagttttcaacttgttgtactcgtcaatcacgtactgctcggcggcgcgctgatcggcgatcggctcgacgcgaacggcgcagtatttgtactccggcgttttcgtaatcgggcttaagttttcagtaaccagctcgttacaggcaccaatccaccactggtaggtcatgtaaatcgcccctttgttcggacgatcgctgacctgcgcacgggtgataattttgcctttacgcgagtgcacccaaaccaatgcctcatcttcaatacccagacgtttggcgtcttcggtattgatttgtgcgtagccaggttcatcagccagcgccgccagtgccgcacagttaccggtcatcgaacggcaagagtagtgaccaacttcacgcaccgttgacagtaccatcgggtactcgtcggtgagtttgtcgattggcgctacccagtcgcaggtgaagaactgcgccagaccgttcggggtatcaaacttctctttaaacagataagaagtcccctgatcggcatctgaagtatcgcggcaaggccactgaatgaagcccagttcgcccattttctcgtaagtcgcaccgtagaaatccgggcacagatgacgcaactcatcccagatctcctgggtgttgttgtagtgcatcggataacccatacgggtggcgatttcactgatgatttgccagtccgttttcagatcccatttcggttcaaccgccttgaagaaacgctggaagccacggtcagccgcagtaaacacgccttcatgctcgccccacgacgttgacggtaaaataacatccgccgccgacgcggttttggtcataaagatgtcctgaacgataaccagttccagatcttcaaaggctttacgtactgccgacagctccgcgtcagtttgtagcggatcttcgcccataatgtacgcggcacgcacttcgccatgcgctgcgcggtgcggcagctcgctgatgcgatagccggtatgcgctggcaggctttccacgccccaggctttggcgaatttctcgcggttagccggatctttcacgtactggtatcccggatacgtatccggcagcgcgcccatatcgcaggcaccctgaacgttgttctgaccacgaaccgggttaacacccgcatgcggcttaccgaggttaccggtcagcatcgcgaggctggtcagagaacgcacggtttccacgccctggtagaactgggttacacccatgccccacaggatggcggcgcttttcgcctgggcatacatccgtgccgcctgacgaatctcactggcgctgacgccggtgatatcttcaaccgactccggcgtgtagccttcaacgattttacgatactcttcaaagccttctgtacgtgaagcgacgaacgctttgtcgtacagattttcttcaataatgacatggcccatcgcattcaacagcgcgatgttcgagccgtttttcagtgcaatgtgcatgtcagcaatgcgcgcggtttcaattttgcgcggatcgcagacgataattttcgccccgttacgtttagcgttaattacgtgattcgccacgattgggtgggaatccgccgggttgtacccgaaaacgaacactaaatcggtattatcaatttcgttaatagcattgctcattgcgccattaccgaccgattggtgcagacctgcaaccgatgggccgtgtcagacacgagcgcagcagtcaacgttattggtaccaataacggcgcgcgcaaatttttgcattacatagttggtttcgttacccgtaccacgcgaggagccggtcgtctggatggcatccggaccgtacttctctttgatggcgctcaggcgctcggcaacgtaattcagtgcctcatcccaggaaacaggttcgagtttgccgccacgctggcgacggatcatgggggttttcaggcgcggggtcaggatctgggtatcgttaatgaagtcccagccataataacccttcagacacagggtaccctggttggttttcccctgcgctgcctccgcccggacgattttgccgttatcgacgaccaggttgattttgcaacctgatgcgcaataggggcaaaccgtgacgacttttttcatcggtctcgctccagttaatcaaatcacgcatacgcgctctcgactacagtatgcatcttttatgccacattttatgtggggtcattccctgatattacgggcactatttattcaaaactctgacgaaaaacaggctgtcgtcagttttgacgtgacgaaacgaaataccgcgtgacagccatcacgcggcagacattttattttttctcgacgacgggacctgcctgatacccgccgcccagcgatttcatcaactgaatgctttggatcacccggcggctgtccagcatcagtaatgacatctcttcggcaagcactggcaaccgggcttcggtggcctgtaagcggctggttaagccgcgctgataggcggcctcggcagcgcgctgggtaaagcgcgtggcttccacgcgttcagcctgcatttctcgctcgtcgttgagcgtttgcagacgcgtgccgttgacggcaacgtcacgcaccgcgttcagtactgactggttgtaacgttcaatcatcatgttgctggcggcgcgcgtgccttcgagattggcattcaaccgtccaccgtcaaacagcggcaatttcagacccgggatgaagttgaactggcgactggtttttttgaataaggtatgcagatggatggagtccagaccgaaaaacgctttgatatcaaagctcggatagaacaacgcccgcgcggaatccacctgatctaatgacgcctgaacataccagcgcatggcttgcagatccgggcgtctggcgagcaacttataagagagtgtcgccggaatgccggtctggacttgcggtaatgccaccggtctgatctccggcatatcgctggctcccgcgccaatcaatgcacgcagagattctcgcgtttcggtgatttgccctttgacggcaacaatttgtttatcgaccgccagaatctgtgcccgcgcgccgtggaaaggcacttgcgcttccagaccgtgcgccactttactctggtgcgctttcaccgcgtaatcaatcacatcgtgagtttgttctaacagatcgagcatctgatagctggcctgcatactgtaataaagctgcgctacgcccgtggccagcgatagctctactgctgcggtttctgccagcgcggcattatgcgcgccaatggcggcggcaaccgctgagcgatgcacaccccacaaatcaagatccagtccggcaaacaaacctactgtggcttccgtatagtacggcccgtccatacccagtgctggcgcatccattgaataagggcttaaaaagccgttcgccgagacacgttggcggttgagcatccctaacgctgcgacctgtaattgtgaaccggcatctaacaaatcggcctgggactgcgctttttcttcccgcagtttcgcttcggcgagggtgtgtgaaccacttagcgtccgttggatcagcgcatccagctgcgggtcattgagttgtttccaccactgcgcctgcggccagccggagctggcaagatgaatatcgtcggccagtttgatttgttccggtttgagctgttgatgaggtgcagaatccttacgtaccagggcacagccggaaatcagcgtcgtgctgccgagaatgctgcacaacagcagacgtgaaagttgacgattgatcattgcgtggctccttgtgcctgttccgtggcgggcgttaatgccggggctgtccagtctggcaagcgggcgaaaagctggcagacgtgttgctcctgttttaataaggtgggcaggatggcctgagaggcgggtgtctcttcaagcgttatttgaggagaacggctgagtgcggttgccagaccggcagcgtatttctccagggcgtcggcaaactgacctgctctgtccggctgtagtgcgttatccagcgcctgcgccgagttccaggtggcatcccaggcgtgaagaagatcgcggccctgacgaataaccgtttgcgaacgttcaatcagtaatgcgcgttcttcgctgtccagttgacgctccagcgccacgcgttggcacatctcttcacaggcattaaacgccgcatgcagaccgatacgaatttgcagataagtgcgcagagccgtgacttcctgctggcgtgggatccgcattactttacttaacatacccagcgtgccagccagtttttgcggcagtgtgcgcgcttcactttcaggccagacaaaggtgtaaatcaccgcggacaccacggtaccaatgatgatacccagggcgcgatcgcgaatttccaccaggtcgtacactgggccaaaaacgttttcgagcgtggcgagcgcgaaggtgaccaccatctgtgtgccgatataagaagagcgttcagagctggtggcaatccatgcgcccaacaggaaaatcggtgccagcacaaacagcaattcgacaatattgtccagccagggcatgaccagtagcgtgaataacagcgccagaatcgcgccgcaaaaggccccgccaaaacgcagcaccatcttctggtacgacgaaccgacatttgggttagcgacgatcacgcatgtcagcatacaggtgtgaatgccttcccagtccacgccgctgtaaaaggtgtaacagatcaaacaggcgagcagcgtttttaccgcgtagcgcatatagtctggattggtaaaagcatcggcggccattgatggcggtttggctgcgggcgttggcggcgtattcgggtccatctgacccagttgtaacaacgtctggcagatattctccaggttacattcccgtgccgccatcgcttcactttcactgatccgccagtcgctttgccagcactgaccttcagcaacggcatgctgcagcttgttgatttctgaagctaatttttgtcggaattcaataattgcctgagaatcagcaaaagaggtgggatcgtagcgattcagcgtcgagtaaatgtaggttaccgttgccacgcagctttgccaccatgcgttttgagttcgccagttggcatcgtccgcgaggcaaaagacattgagtttttgtagcgccagcgcctctctttcaatccgcgtttcgggtagcggtgcgaggctgtctgtcaggtgactaatggcatcatcaagccgatcattaagcgcctgatgcatttgcgaaatggcacgactgggaaaccacagcacgccgattaacgtcatcagcaaggttggatagaggccaacaacgatacaccacagcgttaagcgcacgaccacttccggatagtcgagcatggcggggaaggtttgcccgtaaatagcgacaatggcgacggcgaaaaagaccagccccaagcgatgggtgcgcatcaaaaacatgcagcccatcaggatcggtccggcgatgatcaatcggatcaacggttcgccgtatgaccatttgtagatcaaaaacaggctgccgatctccagcaccgtggcaaccacaaacaagatcgcgacaaatttggtgtaaaacgcgttcgactgaataccgtaaaacagcactgccagcgataacgccacaaaagggatctcaaaggtcatcgagatcagaatcaccagcaggcagcctacccagagttgcacggtctgcggcacgcgacctggtcgccgctcgcttaactcttcatgaaagaacgccagcagcctgaccaccggtaatggcagggagttgagcgcgctcattattgcggctcaagattagcgactgccgaagcgccgatgcggaacatttccgggtcaggtttatcgaccatgattttgaccggaaaacgctgggcaacgcggacccagttaatagaacgagacactttcggcaggccgcccagcaccaggccgccgtcatccggtagcacgccgtagccaatcgaatccactttaccctcgaaggttttgccgctgtcactcatcaggcgaatcgttgcgggtgtacctgagcgaatatttttcagatcggtttcgcggaagttggcgatcacataccagtgacgagtgtcgattagggtaaaaatagggcgcatggcagaagcaaattgcccgacggaggttttgagggaaatgacccggccatcaaacggcgcgcgaacggtcgccatttccagatgcagtttggtcagggcaatatccgcttcgaccgccgcacgctgggcaactaatgcatccacgccgctgacggcgctggcggctgactgcgcctgtaacaatacggcattaagatccgcttctgcggcgcgctgcgccgttcttgcacggtcaacatcttccgctgagacaaaaccttctttcagtaatggctcggtgcggcgtaatgtatctgtggcctgtttcgcggcggcacgggctttttctaccgtggcattaaccgagtcggcaccaaactgttgcgcgtcaacgctacgctgggtgagcataatttgcttatccagcgccgcgagggaggcttcagctttcgccagattggcttcgtacgggcgcgggtcgatgcggaacagcaaatcgccctgtttgactgcctggttgtcggtgaccgccagttctacaatgcggccgctgacttccggtaccacatcaatggtatctgctgacgcgtaagcgtcattagttgatggcgcactgtctacgcgccagataacgaaaacaagggcaaccagcgccaacgcaaccactaacagagcagggaatttactgcgaggagcttttttcggcgtactttccatgagcgcgtctcaaatagattagaaaaatgccagccagaacagcatggcgtagagagcaaaaagggcggtataaataattccgacaaatgccagattgatatttgcccgctgaataactcgcctcgtgatgagcgtcaaaataaggctggcaatggcgcagaaaaaccagctgggataataagcgccgatcaccgggattgccggagataatgagcatcccgaaaccatgaagacgggaattatccaggctgtttttttgagttgcatcgccatgcgagagagaactgttggcatattaaatacatcctgtctgctgcgaacaatatctgtagtgaatatcaatatccattgaaggcgtcagtatggctattttcttgatgaataaaaatagctttattcagccaccgcattcataacttatatattttatttattaattggctgtatatatttttaaaataaatacttttgggggcttcagcgcccccaaaagcgagtgacattaatttggggttacgatattcacccacaaatcgaaattatccagacaggcgataatttcttccagtttcgcgccattgccaataattttggctttcttcgcttttaccagatccgccattttggcttgtccggtcagcacggcgtgcagatcttcacggctgatgtagaaagaggcgtcggcttgcggttgcagcgttttccggtagttaagcacgctatcgttcagcgtcaggttgaggttatcgccgttgctcatattgaagttcaggctgatatttttacccgcagctttcgcgctatcgaggcgaacggccataaagtcgaacagcatttcgaccgacatcccgcgaatggtgtccggggaaccggtggtgccgtggctgaacttatgcaccccttcgcgcagctctttcgcgccggtcaggtagaaaccgcgccatgtggcggactcggcctgatagcccagctgttcaaagttattcgcttgcagattcttcgcgacctggtcacccgggttggcggcaatcacctgtttcagcagttctgccgaccagcggtaatcaccttgcttgttcgcttcttgcgccaggttgatgacacgggcagaaccgcccagcgcctgcacgtaacgtttacccatctccacctgaccatacggatgcaggttagccgggttaccgtcgtaatagccaagatagaagttatacaccgcgcgggcgttgtggctgacagaaccgtaatagccgcggctggcccagttattggcaagtgcaggcggcagcttaatcatgtcgccgatttcattcatggtgtagccctggttcgccaggtgcagggtctggtcgtgaatgtacttgatggtatcgcggtatttaccaatataatcattgatatgcttattgccccagaccggccaggtgtgcggcataaacagcacttccgcgtcgttaccccacatatccagcgtttcgttcagatactcggtccacttgctggtgtcgcgggttttcgcgccgcgcagagtgtagaagttgtgcagggtatgcgtggcgttctcggcggtacacagggctttcagggccggaatatagaagtgcatttcggctggcgcttcgctacctggggtcatcaggaagtcaaactccaggccgtcgataatcatcttctcgccagttctgacgatagttttcgtcggtgcaataatgctcgggtcgcccgttgccagcgtcacgccaaggccattacccacattgccttgcgcgttgtgcggcagtaacagaccgtaagagtagagcgcacggcggctcatgatgttacccgccagcacgttttcgctgatggcttcgtccataaagcctgcaggggcaatcacctgaactttgccggatttaacatcggcttcagagataatgcctttcacgccaccatagtggtcggtgtggctgtgagtgtagataacggcaacaatcggtttttgcggacgatgctggaagtaaaggtcaagtgcggcttttgcggcaggcggcgtcaccagcgggtcgataacaataatgcctttctcgccctcaacgaacgtaatgttagagatatcctggccgcgcacctgatacattttatcggtgactttgaacaggccagaaataccgttgatttgcgactgacgccacaggctggggtttacggtttccggcgctgcggcattaatatcaaatttgtaatcgtccgcgcggtagtaaactttaccgttcgcatcacgcagaataccttcatccagcagcggggcgataaatccacgctgggcatcgtcaaaatcctgacgatcgctaaacggtaatgatttggcgtaattctgattaacctgttgggtatattgagtggcggctttcgcttcctctttcgcgttagcggtatttaccatcatgccgctggcggcagttaacgcaataacaatcctgctcaaacggaataaccgagagttattcatataaatctccatttatcatttatgtcgtaaatatgtaatccatgcaaaatacgtcatttaaagctggcgttatcataattgggaaattgcgactttaataagtggaagtgtgagcggaacgcgccattttattaggcatttgtgctgaagagggaaaattacagtaaaactatcattgcagaaaataatatgagtcgttttatgtgtttattatatatattgtacctgtcgttggcacagcgggacattgcgctactgtgccaacgttttactcatggggctttagcacagaactgtggcaaaaaacgttgatgcgccaatattgctgcaccctgagcgccattaaagtcagaagatgaggcggcaataaagcgcacgacctgatgcggcagtggacggcgcaggtacttttgggtcatggcaacgagagtctcgcgtgggaaggcgggcatatccatcacgccaccgcccaggatcaccgcatcgggatcgaacagattaatgctggtggcaatggcccgtgccgcgttttcaagcagactctggacgaaaggggcgttttccgcatggacgaaaagatcgcgcaatgggtaatttcggggctgttgttcgtaccagcgtcttagcgccattccagagcaattggtttccaggcacccaggattgccacacgcgcagtgttgggtcatatctcccagggggatatgacccagttcgcctgccacaccgtgtgcacccgtccacggcgcaccgttcatccacactgcgaaccccatccccgtaccgagataggccgccagaaccagttgttgcgtaaggcggttttctactacgtcccaggagagttgcaggttaacgtcgcgggaaaactcaaccggacaattcagcgtattttcgagcttatcggcgagatcatataaatccgccgctgttaacggcaggttaggcgtagaaataatggtgcgtttatctttactgaccagcgccggaaatcccatcaccagaccatgacagcgagcgttaaagcgcctgagttgctcgtcaatcatttcgccgatacccgacaccaggccgggagcaatgacttctgcggtccgctttttttcgcagtgtagcgtttcaccttctgctgtccgcagacaaaagcggatatgcgttgcccccatatccacgcccgctacgacgttatgctgtttttgcatgaggctgtacctcgctttttgcagccagaatctgcgcggtcataattctccatgcttcgtcgatattttccgcatgattaaacaggccggaagtgccgacgataaagacatccgcccctgccgccatcagtttttcgtaagttgcctggttgcaggaaccgtccacctcaatttcgtactccagaccttctcgttcacgccatgccttcagttcggcaagtttatccagcatttcaggaatgaacggttgtccggcaaagccgggatcgacagtcatgaccgtaattttatcggccttatggatatagtatttcatggcctcaactggcgtctccgggttaaggatcagccccactttcatgtcatgacggcggatttcatcaatcaggcggaacgcctggccgttgatggtttccggatgcagagtgatgaaatctgctcccgcacgcgccagttgagcaatgtaatcctgcggccgcgtcaccatcagatgacagtcgagcggtttagttgccagttttttaacctgacttacgaagaacggtgagagtgtcagattggggacaaagtgaccgtccatgatatcgatgtggaagtaatcggcatggctgtcgataaattcgatctgttctttaaatttcagcagatccatacacattaacgagggggagattttcatgttcaattccttacttactgataagacggtcaagggcgacagccgcgataattaatccgcccatcaccaccagttggtaataggtttgtacctgcaaaatattcagaccgttgttgatggtgccgatgatcaacccgccaatcaccacagagaaaatgcgccccttgccgccgaagaaactggtgccgccaatgatggcgctggcaatggcataggtttcaaaacccataccggcaagcggttctgcggcaccgagtcgtgcagttgagacgacgcctgccagacctgcacaaacaccggagatgataaacaccaccaggatgtggaatttcacgtcaatcccggaatagaacgccgaatttttgttgccgcccagtgcgtagatgttgcgcccgagccgcatacgcgttgtcagaaaccaaaggatgagcgcgacaattagtgagaagataacggggacaggtatcccaattacgctggcggcaaagaagttcacgaagtcaaatgagaagccgtataccgagttggcatcggagatcaccagcgtgatcccacggaaaatcgcgttggtgccaagggtgatgatgaacgggtgtagccccgtccagttgaccaggcagccgttgatcgcccccagtgcgccgccaaccagtacaccgccaatcatcgctgcgagaaacgggtcaacacctgccaacatcagtttggcggtcaccataccggaaagcgccagaatcgcgccaaccgagaggtcgataccagcgaccaggatagcgaaaaactcgcccatgccgatcaataccgtcacggagctttgaacaaaaatctgggtaatattattggtggtcagaaaatattctggtgacagcgaaccaaagatggcgacgatgatcgccaggataaaaaaggtgccgtatttatcccagaacagcgcaaagttgaacggtttcttctcgctcgcttcgctttttactcttgtggtaaagcccatgccataatctcctcttcgctcatgtcatcgcgattcgtcaggatttgcgtcagtcgtccttcgcagaacacggcgatgcggtcgcagacggtgataatttcaggtagttcagatgacaccatcaggatgacttttccgtcgtccgccagttggcgcatcactttgtaaatttcggctttcgcgccaacgtcgatgccgcgggtaggttcatcgaaaataatcacttccgggcaacagcacagccatttggagatcaggactttctgctgatttcccccggagagttcggtgatattctggtttaccgaatgacatttcagcgccagcagttcgcgttgattttcagcggtacgttgctcgtcaacttcatgaaacaagcccatcgcgcctttatagccgccgtctttcagactgcggctgatcgccatgttctgagcgatggaaaagttggggaaaaaaccgttatcccggcggctttcagtgatgtaagccatcccttttttcacggcatccaggggtgaacgtggagagatatctttgccattaagacggatttctccgccagcgcgtttatccacgccaaacagacaattcatcagttcagtacgtccggaaccgaccagtccggcaaagcctaatatttctccccggcagacgctaaatgagatatcccggaccttttttctgtcacgactggtgacgttccgcacctcaaaaaccgtttcgtgcgcaaggttgctgacattctccttcatcgcgttaaaacggttttgcagttcgcggcctaccatcagacggacgatatcgtcatttgacacatcgcttactatgccgctgcaaacgctgctgccgtctttcatcaccgtatagcggtcgcaaatacggcgaatttccgccaacttatgcgagatatagacgatggccgtaccctctttacgcaactgattcatgatcagaaacagatagtccacctctttattggtgagtgaggaggtgggttcatccatgatgatgactttggcatcgagcatcagcgttttggcaatttctagcatctgcttgtggctgatagataaattcgccactttctcatctagatcaactttcaagcccacgcgtaataacatcatggcggcgcggacacgcatttctcgccagtcgataatattgacgccacagatttttttcgtcagatgacgaccaatatataaattttccagtacggttaattcatcaataacgctgagttcctgataaataatcccgataccgagttgtgccgctaatttatgatccagcttgttatagctaatgttattaatggtaatggtgcctttggtcggctcatgtattccggataaaactttcattagcgtggatttacccgcgccattttctcctagtaatgcatgtatttcaccaggataaaccgttaaattaaccgactttaatgcgtgaaccggaccaaaggacttgccgatccccgccatcgatatatatggcgtggccataaataacctctctgcacgaaatatcgtattattgcctgatggctacatttatcaggtctacgttcaggttattttgttggccggataagacacttcattagcatcatcatccggcatcattcagttttattgagtgaccaggattgaatcgaccagtttaaattccggtgctttatccagcgggataaccttgccggatttctcagcgtcaaccatcagcttcagacccgttgcgccgatatccgccgggttctgggcaaccgtcgcggtcatttgtccggcttccaccattttgcgggcttccggaatgccatctgtaccgacgaccagcacttttcccgtttttccggcgtttgcgactgcctgagcaacacccattgccatcgtgtcattcgcgcaatagatcgctttaatattcggattacgttgcaacacgttagtggcgacatccagtgctttaatgcggtcccagtcggcaggctggctggcgacaagcttgatctggcttgcttttttgaaggcttcggtggcaccattacgacgcgcttcaccggaggcgttaccggctttaccctcaatgattgcgacttcaccaccttcagcgcccaatttgtcaataatgaacgacgcgcctttcgccccgacagcaacgttatcggtggtgacaaaagcttccacattgccgccagcttttttcagattatccatgtcgattttttcatcgagattaaccagataaatgccttttttccatgcgcgggcgacaggcatgaccagattcactgaggataatggagcgaaggcgatacctttgtaatttttattactgagatcttcaaataactgcaattgagattgaaaatcgccttctgaaggagaggcaaaaatatcaacgctgacgcccagtgtttttgcttcatcttcaatgccttttttcatatctacccaaaatgggttggagagggttttcaatacgacagcatattcggcggcagcaaaagcgctggttgacaacattaagcccacgagtgtgccgctgaaatatttcagatatttattcataataatgttctcacggtaaggggacaggtaactccgcgatggcggaattacctttttcttatttcagcgcgcctggtgagaagaaatcaacaattgcgccggttttttgcatattaatattagcttgttcaatgttgagctgggcgacagagacaaaaaaagcgtccagcaaagttagttgtaatattcttgccgaggcattacgacctaataacggcgtttccggggctggtgagcaaataatataatcggccagtttcgctatcggtgaatggtagctatgggttatacaaataatctttgccccgttcttttttgccagttctacggccgcttttacatcactggttcgcccggaatgggtcactaccagcacaacatctccttcctgtaacaacgaagcggacatcatcatgatgtgagcatcaggataggcctgacagcgtacgccaatgcgcaagaacttgtgctgtacatcagcacagatagcatttgatcctccggcaccgtacaaatcccgctgtctggcctgatagaaaaagcgggcggcacggtggatctcatcaacgttgacgatcgactgaccttccataatggtgcgtaaagtgatgttaaataccttattcaccacatcctgcggcgcttcatcaaaagccaactcggaaggcaatacctgttctgactgagaaaaataatcttccagcgcactgcgtaagttacgaaagccgctaaaccccagcagctttgataccttaactatcatcgcttcagataccgccagagcttctgcgacatctttaattgcgggtgcacaactcaggttaccgggtttgagtaaccactccacgatgcggctttcattttctgtcattccttcctgcttcattcgcaggtaaggcgctaaccctataccgttcggaagcgctgaatcaaactctgactggctcatcacgttctcttgtccttgaattgaagacgccactatatcaccacagcaagaacagaaaagatgctggcgacttcacaaaaaaataaaatttataaagtttattttattgtgaacaatggcgagtggctgaaaattttatttcatttaattagtttaaaaacatgatgttatttgtttttctggttttttagatgatagatgttgctggatggtgagtgtctttaacgctattgcgctgtcagatgtaactctgtaaaacagatcaggaaggcgtaattcatcgattttgggtgtttttaattcattaacatcacaaatgttttttgattgtgaagttttgcacggacggggaagatgaatgaaaaagattgcatttggctgtgatcatgtcggtttcattttaaaacatgaaatagtggcacatttagttgagcgtggcgttgaagtgattgataaaggaacctggtcgtcagagcgtactgattatccacattacgccagtcaagtcgcactggctgttgctggcggagaggttgatggcgggattttgatttgtggtactggcgtcggtatttcgatagcggcgaacaagtttgccggaattcgcgcggtcgtctgtagcgaaccttattccgcgcaactttcgcggcagcataacgacaccaacgtgctggcttttggttcacgagtggttggcctcgaactggcaaaaatgattgtggatgcgtggctgggcgcacagtacgaaggcggtcgtcatcaacaacgcgtggaggcgattacggcaatagagcagcggagaaattgagattcatccactacttgcatggatgagtaatgattaatgtggatagagtttctttttgaggttggctaatgaaacgctttccgctatttcttttattcaccctgctcacgctgtccaccgttccggcccaggccgatattatcgacgacaccattggcaatattcagcaggcgattaatgacgcttataaccctgaccgtgggcgagactatgaagattcgcgcgacgacggctggcagcgtgaagtgagcgacgatcggcgcagacaatatgacgaccgccgccgccagtttgaagatcgccgcaggcagctggacgatcgccagcgccagcttgatcaggagcgtcggcaactggaggatgaagagcggagaatggaagatgagtatgggcgatgaggttgggtatggagcaggcatcgcccctcaccccaatgggggagagggagaaaacgagcgcaatattcaatatcgagcacaatcggtcccctcgcccctctggggagagggttagggtgagggggccagcgcgcacattccctctcatcacgccaccccaatctccatcccatcaaaccccacctcaaaccctgacggtagtgcgttttccatcagccacgcatcaaactggtggctgatatgggtcagaatcacccgtggcgagcggataacctgattcagcgcaagcacggtatttaaatcacagtgattacgcggtgcatccgcgcgcggcgggtgactgcaatccatcaccattacctgcggctgattattgcgtaaaaatttcagcgttttttccggcaagcctgcggtgtcagacagccacgccacccggctgtgtgccgtttccagcagataaccgaaggtcagttttgagtggttgagcggcaggggcgtgacctgtaacccctgcaaatcaaacaccacaaacggttccaccgtgtggctgaaatcaagcaggcccggatgtttaaacagatcgtcgcagccctgttcatccggcgggccgtaaaccgggatcggatcgccaacgccccagcgcagcggaaacagcccctggacgtgatccatatgataatgcgtcagcaaaaactgctggaacgatccgggcgaccagcgatcggcgagatcgtgcagcccggcgtcgatcagggtgattgcgtcgttaaacttcactacgccgctgcacggttggcggcgatactgcggcgagcgccgcgctctggcgcaggccgcacactcgcagccccatgccggaacgccctgtgcgccgccggtgccggtgagcgtgagggtcaggctcatgttacagcgccttggtgaagcggaagtggctctgctcgtagccttcgcgcagatagaaacggtgcgcgtcgtggcgcttcacgttggtcgaaagttcggtcatttcggccccggcctggcgggcttcttcttctgcccacgccagtaacttactgccgacgttcagaccgcgcgcctgcggcattaccaccaactcctgaatttcgccgatccagttgacatgatgcagatgaaactgcaaatgcaggccgatcatgccgacaacttcgccatcaagcagcgccagatggtagcgcatgtttgggtcgcgcagattggcgttaaaacccacgcgaaacgcgtggtggtcaaactccgcctgttttagctcacaaatcagcgcgtaaaccgcgtcggtgtcgtactgcgtggccgggcgaagctcacaagcaggcatggtgtttctccttctgatggatcagcgtcagcagcgtgtcgaccgactggcgcaggctgccgtcattgttgagcgtatggcaatcctgtggagtatagcgggcggcgcgcgccaggcgggcgttaatttcactggcgttttcacggccacggttttccaggcgctggcggaggatctccggcgaaacctgtaaacagacgggcagcagcgccgattgatagcgcgcccgcgcctgcggcagatgggcgcgtgagccgttgaccagcacgtcgaatccggcgtgcagccagagatcaatctcgacgccgacgccataatacagaccgttagcgtgccagcttaaggccaacagattttgccccgcgcgggtaaaaaactcctgctcgctcagggcgatatggttttcacttccggcgctggcatcgcgcgtgatgtagcgatgcgccaccagtaactgagtttgttcccgcaggcggagttccgccagcaggctgtctttcccggagccggacggccccattaaccaaatcagttttcccatcatcagaacacccttttaccctgacgccagacgtggtcgatatgaatatgattgtccttgcgatgcgccagcaccaggtcggcgcgtttgccctcgccaatcaccccgcgatcctggagattaagcgcctgcgctggatttttagtcaccagcttcaccgcctgcggcagcgtaaagcggttgctctggtcatcggcgacgcgaaatgccgcatcgagcaggctggcggggtagtagtcggaagagaggatatccagcaggccaagctgcgccagttcactggccgccacgttgccggagtgcgagccgccgcgcacaatattcggcgcgcccatcagcacgttcatgccatgcttgcgcgaggcttccgccgcttcgaacgtggtgggaaattcggcgatcacgctgccaagctggtgagattcagcaacgtgggcgtgggtggcgtcatcgtggctggcaagcgcaatttttcgcgcgcggcacagggcggcgatggattcgcgattcggctgcgaccagcgtgcggcgagcgccagttgctcttcttcgtactgctgcatctgcgcatcagtgagggagtatttgccctgataatattcgcgatacttctcgcggttggcgaactggcgctggcccggcgagtggtccatcagcgacaccagcgtcaccggctcgcgctgcaccagtttttcaaacagcggcagcgtggtgtgatgcggcagttcgcagcgcagatgcagacggtgctcggcgcggttgacgccgcgtttctgcgtctcttcgatggcgttgatcatcttctccagattctccagccgatcgccgccgtcgcgcacgtcgccaattgccacggcatccagtacggtggtgatgccgctcgccaccatcagcgcgtcgtggctgctcatcgccgagtgggcaggccagtcaactttcgggcgcggggtgaagaatttatccagattatcggtatgcagctcaatcagccccggcagcagccagccgccttcgccgtccatcgcctccggcaggcggctctggctttcggcaaaggcgcggatttcgccgttctgcacctccagcgaaccgcttaccacctcgttttccagcaccagcttaacgttattgataatcatgaagaggctcccattgggtgcaggcggtcggcgacgtcattacgtacagcttcgtcatggaagatgcctacgatggctgcgccacgggttttggcttcgcgaatcagttccaccaccgcggcgctgtttttggcgtccagcgaggcggtaggttcgtcaagcagcagaatggggtagtcgacgataaagccgcgggcgatgttgacgcgctgctgttcgccaccggaaaatgtcgatggtgccaggtgccacaggcgttccggcacgttcaggcgggtgagaagacgcgcggctttagcggcgcaggcttcacgcggaacgccggtatcgagcagcggctgcatcaccacttccagtgctgagatacgcgggatgacgcgcagaaactggctcacccagccgacggtggttttgcggatttccaccactttgcgcgctggcgcggtgaccaggtctacccactcgtcaccgtgtttgatctggatttgaccttcgtcgggcagatagttggcgtacagcgagcgtagcagagttgatttgccgctgccggaatggccgtggagcaccacgcattcgcccgcgttgacggtgagcgaggcgcgattgaggacgggcaggcgcacgccgttttgctggtgcaggatgaaggttttactgacgttttgtacgttaatcatttttcgcctcgtggttcgggtgtcggatgcgacgctgacgcgtcttatccgacctacggggagcgcatttgtaggccggataaggcgtttacgccgcatccggcaccggctcaattctgcaaaaccgatgacaccagcagctgtgtatacggatgatgcgggtcgtcgagcacgcggtcggttaacccactctccaccacttgcccctgcttcatcaccagcaaacggtccgccagcaggcgggcgacgcctaaatcatgggtgacaatcaccaccgcgaggttcagctccaccaccaggccgcgcagcaggtcgagcaggcgggcctgcaccgacacatccagcccgccggtcggttcatccataaacaccagcttcggatgcgtcaccaggttgcgggcaatctgcaaacgctgctgcataccgccggaaaaggtggtcggcaggtcgtcgatccggttggcgggaatctccacctcttccagccacttctgcgcggtggcacgaatatcgccgtaatgacgtgccccggtcgccatcagccgctcgccgatattgccgcccgccgacacctggcggcgcaggccgtcgagtggatgctgatgcaccacgccccattcggtacgcagcaggcgacggcggtcggcctcgctcattgcatacagcgaacggttctcgtagtgaatttccccctgctgcggcgtcaggcgcgcggagatcgacttcagcagcgtggtcttcccggagccggattccccgacaatgcccagcacttcccccggccataaatcaaaagagacatcgctaaagcctttgcccggcgcgtaaaggtgggtcaggttattgaccgaaagtaacggttgattcattggttttttgcctcgctctgttggcggcaataatcggtatcggagcagacaaacatgcggtttccggcgtcatccagcaccacttcatcaagatagctgtgggtcgatccgcagatggcgcatggctcatcccactgctgaacggtgaacgggtgatcgtcgaaatcgagactttccacgcgggtaaacggcggcaccgcatagatgcgcttctcgcgccccgcgccgaacagttgcagggcgggcatcatgtccatttttgggttatcgaatttcgggatcggcgacgggtccatcacgtagcgcccatttaccttcaccggataggcgtaggtggtggcgatatgaccgaagcgggcgatatcttcatacagtttcacctgcatcacgccgtactcttccagcgcgtgcatggtgcgggtttccgtttcgcgcggctcgataaagcgcagcggctcggggattggcacctggaagataattatctgatcttcggtcagcggcgtttcggggatgcggtgacgcgtctggataaccgtcgcatcgtccgtacgttccgtggtgtttaccccggtcacgcgcttgaagaagttgcgaatcgacacggcgttggtggtgtcatccgcgccctggtcaatcaccttcagcacgtcgctttcgccaatcacgctggcggtaagctgaatgccgccggttccccagccgtacggcatcggcatctcgcgcccgccaaacggcacctgataaccggggatcgccaccgcttttaagatggcgcggcggatcatgcgtttggtctgctcgtcgaggtaggcaaagttgtagccgctcagattagccatggttctgctcctgttgcagacgtttgagtagctccagttcggcctggaaatcgacgtagtgggggagtttgaggtgtgagacaaagcctgcggcttcgacgttgtcggcatgtgccagcacgaactcttcatcctgcgccgggcctgtcgcgtgctcgccgtactccggggcttgcagagcgcggtcgaccagcgccatcgccatcgctttgcgctcgctcatgccgaacaccagcccgtagccgcgcgtgaagtgcggcggctcacccggcgggtcgataaaaccgttaaccatttcacactcagtcatcagcagttcgccgacgttcaccgcaaatcccagctcttccggcacaatcgacacgtcgatatagccgctgcggatctcgcctgcgaacgggtgattgcgcccgtaaccgcgttgggtggagtaggccagcgccagcaaatagccttcgtcgccgcgcatcaactgctgcaaacgggaggagcgtgagcaggggtaaaccggcggcgtgcgggtgatgtcatccggctgtgcgccgctatcctcttcaaacttcgccagcccctgacgcgccagcaggctgaaaacgtgcggcgacggctgctgttcgctgtcggcggtggtcagcgtcggcgcttcgccgtttgccagcagggtaaaatcgagcaggcgatgggtgtagtcgtaggttgggccaagcagctggccgccgggaatgtctttataaacggcggagatacggcgttcgagacgcatcccggtggtgtcgagcggctcgcttaccgccagcttcgccaacgtggtgcggtaggcgcgcagcaggaaaatcgcttcaacgttatcgccgctggcctgtttcagcgccagcgccgccagttcgcggtcggcaatgccgccttcggtcatcacgcgatctaccgcgaggttaagctgctgttcaatctgggcgacgctcagttcgggcaaatcggtatcgcctcggcgtcggctctcttgcagggcgtgggcggcgtcgatcgccttctcgccccctttcacggcaacgtacatcagcacacctccacatgagtggttcgcggaatagccagcaggcgctcgccacaggtcaggatcaggtcgatgccgagcgggaacggatgcgggcgctcggtgagttcgtgcagaatgcactccggcagctgcggagcgatcattcgttcttcggcaatacccgcaccagtaaggcgcaacatgcgtccgccgctcaggctggcgacctgtaaaatcagcgtcgcacccgcttccggcgcaacggcggtgccggtggaaagggcgttgagctgttcgctggaaatcgcctcatccgtcaccgcgaaggtcgcctgttccggctggctgaccagcggcgcgttggtatgaaaacgcaggctctggttgacgatatcgttatttaatggggtagaaagccacaccggcgtgtcgttatcggccagcgtcagcagcacgctggtggtggcgatattcagcggttgccagccgcgtttgagctgatgcagggcgacaatcacgcccggctcgctcatggcctttaacaggcgacgaaaactgtgctgggcatcctgcacgggaagcataaaagcggtttccagggtcatgcgttgtctccgcgaaccatcgtaaagaagtcgacccggctggcgttcacttcggcctggcgtgcggcaatgcgtgccatacggtcagcgtccagcggggcaataagggtttctgataagttttgaaagtggcgagattgctgcatcagcgcgtcaatcagcgcgcagcgttcggcgtgctgtttatcacgcccctgcacccagctgtagccgagcgtgccgtcagtcaggcgcacggcggcgcgggtcagcgtggcgtcgccggcaaaaaaacgttcgccggtgccgcccatccgcgcctgaatctgtaccaggccagtttcagcggcgcggatcacctcatagtcggcggtgatgtttagcgcgttcaggcgtgctgccagttcagccggttggctgtgcgccagcacggacatccagtgctggcgggtcgcggtatctgcgtgcattcagtgctccatagtgaattcaatcatgtcggcgcgcgtcaggctgacggagtactccgccgggctgctttcaccgtcacggtggttaagggtgcgcacgcacagcagcggcgacatattcgggatttcaagacgctggcactctttggcctgggcgcggcgggcgctgatccgcgtctggctgcggcgcagcgcaattccggtttgctcgcgcagaaaatcgtgcagcgagccgctgtcgaagcgttgcagcgtcggccagagggtgaggtccgcgaagtagtggtcgattaaacagagcgcgacgccgttgacacgacgcagggtgcgcaggtggatgacgttctccccctcggtaatccccagtgcgtcagcgacgtggccggacgcggggcgcaataccgaaagcagtttttcgctggtgggatggctgccctgatccagcagattctggctaaaacgcgcctgggcgttgagcgggtaatcgaacgggcgcatcagcaccagcacgccgacgccctgacggcgctgtacccagcctttttccaccagttggtcgatggcgcggcgcagggtgtggcgattcacctcaaagcgcgctgccagttgctgctcggcgggaagatagtcgccgcagcggtagtgttgacgaagctcctgctcaagttttgcggctatctcttgatagcgtgttgggtagctggtcggatgtgtagacaagtgcatagatatcaatgcctcgcttatcagataaagtgcttacgcaaccgttgagagaggaaatccagcaggctgaccgtgacgatgataagcaccatcagggcgcaggtttgttggaactggaaaccgcgaatcgcttcccacagggtgacgccgatcccgcctgcgccgaccatgccgacgacggtcgccgagcggacgttggattcgaagcgatagagggagtaggagatcagcagtggcatcacctgtggcagcacgccgtagaggatctcttcgagcttgttggcaccggtggcgcgaatgccttccaccgggccgggttcaatcgcttccaccgcttcggaaagcagcttggagagcacgccggtggtgtggataaacagcgccagcacgccagcacgccagcgaacgggccgaggccgacggcgaccacgaacagcatggcgaagaccatttcgttaatggcgcggcaggcgtccatcaggcggcgaacgggctggtaaacccaccacggcaccaggttttcggcgctcatcaggccaaaggggatggagagaaccaccgccagcgcggtgccccagacggcgatttgcagcgtgacggccatttcggtgaggtaatcctgccactggctgaaatcgggcgggaagaagtcggcggcgaacgtcgccatgttgccgccgtctttgatcagcgtaagcggggccatttccgcgccctgccacgagacgaccaacacggcgagtacaacggcccagctcagaagcgagaaccagctgcgcttgggtggggcgatggtgatggtttgcatgtttggctccggtctgtaggccggataaggtgcttgcaccgcatccggcatcaacgcctgcacattgtcggatgcgacgccggggcgtcttatccgacctacgatttactgcaccgctttactcaccgaactcatcgcgcttagcgcgttgttcaggcggtccaggtcatccagctgcgcctgaatctcggtggtttttgccagcttgtcctgctcattcagtcctttattgcttttcacgccctgcatctctttaaacagcgcgagctggcgaatcggcaccagttgcaggtcgctggaagcgcggaatggcgcccagcccaggcgttccagcaccgctttttcttccggcgttttgccgtagttcataaagaagtcgtagatcttgtctttggtggtttcggaaagattcttgcgccagacgatcggatcgcctgggatcagcggcgacttccagatcaccttcagttctttcagcttctctggcgcggaggttttcagcttgtcgaggttttcggtgttgttggtggcaacatccacctgcttgttggcgacggccagcgcgttggtttcatgcccggcgttgacggtgcgcttgaagtcgctggcggagatattgtttttggcgaagacgtagtagccggggacgaggaagccagaggtggagttaggatcgccattgccaaaggtgagatctttccgcttcgccagcagatcgttcaggttgttgatcggactgtctttgttgacgatcaacacgctccagtaacccggcgatccatccgccgcgaccgtctgggcgaagacctggccattggcgcgatccaccgcttccatcgccgacagattgccgtaccaggcgatatccactttattgaagcgcatcccctggataatgcccgcgtagtccggggcaaagaaggcgttgaccttcacgcccagcttcttctccatatcctgcaagaacggcgtccattgcggtttcaggttttgctgtgattccgttgaaataatgccgaaattcaacgccttttcctgctcttcggcgtgcgccgggcttaacagggtgctgaggctgaacatgctggtgaaggccagcgaggcaattatcttagcgttcattcgttttcctcaatgatggggatgtcaggcagctttcgcgttctcttcgacgcggttaatgctgcggtagagatggtcaaaacgttcgttatcaaactgttggctgctgccgtcgtagaagacgtgcccctggcgcagggcgacgatgcgttcgcagtagcgcagggcgtaatccacctgatgcagcgtgacgaccacggtgatgccgtcgttctggttgatgtcgcgcagggtgtccatcacgatgcgcgctgattctgggtccagcgaggcgatgggttcatcggccagaatcactttcgcctgctgcatcagcgcacgggcaatcgccacacgttgctgctggccgccggagagggtggaaacgcgctgatgggcaaaatgcaccatgccaacgcgggtcagcgcctgtaacgcgcgctgtttctgctcgccggtgaaccagctaaaacaggtgcgccagaacggcgtgctgccgagcgcgccaatcagcacgttctccagtacgctcaggcggttcaccaggttgaattgttggaatatgtagccggtatgggcgcggcttttgcggatatcgcgggccaggcggccttcgcgctggactgtgcggcccagcagctcgatatggctaccgacagatttatcgccggtaatcaaaccgcttaagtgacgtaaaagggtggattttccggaacccgacggcccaagcagagccaccatttcaccgtgatgaatgttcagatcaaccgcatgcagcgcctgatgctgattgaaggttttggcgagcttctcgacacggataatcgtttgcatgatgcagcctccctaaaaaagtggctccatcgtggcggattattgtgacgatttggttaattaaaagtgactaacagatgaagagttaacgggaattcgatgacagtgcgggagggcgggcctcccggcgggttattgcgttggttgttgtttgacgacattaatcatccacggtacgccaaatttatcggtgactttgccaaagccatgcgcccagaaagtttcctgccaggccatttcgatttttccgttagcggcaagattgtcaaaccagcgttttccttcttcgacctgttgcgaatcgagcaccagcgtaaagccggagtagctggcttttcctgacggcatggcatcgctcatcatgatgtcgcttccggcaatgcgcacattggcgtgggcgatggcggtatcgggaaattgcattccggaagggcagttctcggcgctgtcctgcgctgattttggcatttcgccgaagctgattttatagagcagttccgcgcccaacgtacgttgataataggcaatcgcgtcggaacagttaccggcaaaagagaggtagggacttaacggcatgatggtgacctcagttaagagaagccagttaagtgtagttcgaaatttatacagatgagaggcggcctgataagacgcgcgagcgtcgcatcaggcagtcggcactgttgccggatgcggcgtaaacgccttatccggcctacggagggtgcgggaatttgtaggcctgataagacgcgcaagcgtcgcatcaggcagtcggcacgattgccggatgcggcgtaaacgccttatccggcctacggagggggcgggaatttgtaggcctgataagacgcgcaagcgtcgcatcaggcagtcggcaccgttgccggatgcggcgtaaacgccttatccggcctacggagggtgcgggaatttgtaggcctgataagacgcgcaagcgtcgcatcaggcatctggcaccgttgccggatgcggcgcgagcgccttatccggcttaccgatcacaatacaatcagttctttttcacaaactcagatttcagtttcatcggaccaaaaccgtcgattttgcaatcgatgttatggtcgccttcaaccaggcggatgtttttcactttggtgccaattttcagcatcgaagagctacctttcaccttcagatctttaatgatggtaacgctgtcgccgtcagccagcagattgccgttagcatctttaacgatcagctcgtcgctttcctgtgcaggttctgcgtcgttccattcgtaggcacattccgggcagatgtacatgccgttatcttcgtaggtgtattcggagttgcattttgggcagtgtggtaatgacatgtggatttcctcaaaagtcagcagggcaaaagcgccaaaaaacggcagattgccgaaaaaggccgcaattatacacaaaatccctgagtttgtcgggggtactgctgattttagacgacgatcgttttcatttgaaaggaaacgcaaaaagaaaataatctttttgcctctatttattatttaagataatgttaatgctctacttgttctttttttaattcacatgatatttttatctttctgacgttttaaacgtatcagaagacgttatttattctgataaaaaacaacacactaaatataaaattatttcttgcagtaattataaaagccgaaaacagaactcaaaaacaatctggctaaataaaataacaaaatttgctttaaggaagaattttctatgtacacacagaccctgtatgagttaagtcaggaggctgaacgcctgttacagctttctcgccaacagttgcagttactggaaaaaatgcctctctctgtacccggagacgacgcgccacaactggctttaccctggagtcagcctaatatcgccgaacgtcacgcgatgctgaataatgagttgcgtaaaatttcccgactggaaatggtgcttgcaattgtcggtaccatgaaagcagggaaatcaaccaccattaatgccattgttggtacggaggttctgcctaatcgtaatcgcccaatgactgcgctgccgacgcttattcgccatacgcccgggcaaaaggaaccggtactgcatttttcacatgtcgcgccaatcgattgtttaattcaacaattacaacagcgcctgcgtgattgcgatattaagcatctgaccgatgtgctggaaatagataaagatatgcgtgcgcttatgcagcggatcgaaaatggcgtcgctttcgaaaaatattatctgggtgcccagcctatttttcattgtctgaaaagtttgaatgatttagtgcgactggcgaaggcgctggacgtcgattttcctttttctgcttacgccgccattgagcatattcccgtgattgaagtggagtttgtccatctagcggggctggagagttatcccggtcagttgacgttactggatacccccgggccaaatgaagccgggcaaccgcatctgcaaaaaatgcttaaccagcagctggcacgcgcctcggcggtactggcggtgctggattatacgcaactgaaatcgatctccgatgaagaggtccgtgaggcgattttggcggtggggcaatcggtgccgctgtacgtgctggtcaataagttcgatcaacaggatcgtaacagtgacgacgccgaccaggtgcgggcactgatttccgggacgctgatgaaaggctgtattacgccacagcagatatttccggtgtcgtcgatgtggggctacctggcgaatcgggcgcgctatgagttagccaacaacggtaagttaccaccgccagagcaacaacgctgggtggaagattttgcccatgccgcgcttggcaggcgctggcgtcatgccgatctggcggacctcgaacatattcgtcatgctgccgatcagttgtgggaagattcgctgttcgcccagccaattcaggcgttgcttcatgccgcttacgctaacgcctcgttgtatgctctgcgatctgccgcgcataaactgttgaattacgcgcagcaggcgcgggaatacctggattttcgtgcgcacgggttaaacgtcgcttgtgaacaattgcggcaaaatatccaccagatcgaagaaagtttgcagctattgcaactcaatcaggcgcaggtgagcggcgagattaaacatgaaatcgagctggccctgacctccgccaaccactttctgcgtcaacagcaagatgcgctgaaggtgcagttagccgccttgtttcaggatgattcggagccgttaagcgagattcgtacccgctgtgagacactgttacagacggcgcagaacaccatcagtcgcgactttacgctgcgttttgccgagcttgaatccaccctttgccgggtgttaaccgatgttattcgccccattgagcaacaagtcaaaatggaattgagcgagtcagggtttcgtcctgggtttcattttcctgtttttcacggcgtagttccccacttcaacactcgccagctgttcagtgaagtcatttcgcgccaggaagcaacggacgagcagagcacgcgtttaggcgttgtgcgtgagactttttcgcgctggttgaatcagcccgactggggacggggaaatgagaaatcaccgacagaaacggttgattacagtgtgttgcaacgagcattaagcgcagaagtcgatctctattgccaacaaatggctaaagttctggcagagcaggtcgatgaatctgttacggcaggcatgaatacttttttcgctgagttcgcttcatgtttgacggaattacagacgcgtttacgcgaaagtctggctctgcgtcaacaaaatgaatcggtggtcaggctgatgcagcagcaattgcagcagactgtgatgactcacggctggatttacaccgacgcccagctgttacgcgatgatattcaaacacttttcacggcagaacgatattgaccaagacgttacttgacggccccggtcgcgtgctggagtcggtttatccccgctttttagtggatctggcgcagggtgatgatgcccgccttccacaagcccatcagcagcagtttcgtgaacgactgatgcaggaacttctttcgcgtgtgcagcttcagacatggacgaacggcggcatgttaaatgcgccgcttagcctgcgtctgacattggtggaaaaactggcgtcgatgctggatcccggtcatctggcactgacgcagatcgcgcagcatctggcgctgctgcaaaaaatggatcaccgccagcactctgctttcccggagctcccccagcaaattgccgccttgtatgagtggttttcagcccgttgtcgctggaaggaaaaggcgttaacgcaacgaggcctactggtgcaggcaggtgatcagagcgagcaaatttttacccgctggcgtgctggggcgtataacgcctggtcgttgcctgggcgctgttttatcgttctggaggagttgcgctggggggcatttggcgatgcctgccgtctgggaagcccgcaagcggtggcgttgttgctgggtgatttgctcgagaaagcgacacaacatctggcagagagtatcaatgcggcaccgaccacgcgtcactattaccatcagtggtttgcctcttcgaccgttccgacgggcggggagcatgctgattttttaagttggctgggaaagtggaccacggcagataaacaacccgtttgctggtcagtgacccaacgctggcaaactgtcgcgctggggatgccacgactctgttcagcgcagcgtctggcgggggcaatgctcgaggaaatcttctctgtaaatttggcgtaaataatcagttacatcaatgagtcctaaacgaaatccatgtgtgaagttgatcacaaatttaaacactggtagggtaaaaaggtcattaactgcccaattcaggcgtcaactggtttgattgtacattccttaaccggagggtgtaagcaaacccgctacgcttgttacagagattgcatcctgcaattcccgctccccttttgcggccgtcgcgctgatttttctggcgtttgcggaaatgggccaactctgcgaggaaagctatgctgaaaaggaaaaaagtaaaaccgattacccttcgtgatgtcaccattattgatgacggtaaactgcgtaaagccattaccgcagcatcactgggtaatgcaatggaatggttcgattttggtgtttatggttttgttgcttacgcattaggtaaagtttttttcccgggggctgaccccagcgtgcagatggttgctgcacttgccactttctccgttccctttctgattcgaccgcttggcggactcttctttggtatgttgggcgataaatatggtcgccagaagatcctcgctatcactattgtgattatgtcgatcagtacgttctgtattggcttaataccgtcctacgacacgattggtatttgggcaccgattctgctgttgatctgtaagatggcacaaggtttctcggtcggcggtgaatataccggggcgtcgatatttgttgcggaatactcccctgaccgtaaacgtggctttatgggcagctggctggacttcggttctattgccgggtttgtgctgggtgcgggcgtggtggtgttaatttcgaccattgtcggcgaagcgaacttcctcgattggggctggcgtattccgttctttatcgctctgccgttagggattatcgggctttacctgcgccatgcgctggaagagactccggcgttccagcagcatgtcgataaactggaacagggcgaccgtgaaggtttgcaggatggcccgaaagtctcgtttaaagagattgccactaaatactggcgcagcctgttgacatgtattggtctggtaattgccaccaacgtgacttactacatgttgctgacctatatgccgagttatttgtcgcataacctgcattactccgaagaccacggggtgctgattattatcgccattatgatcggtatgctgtttgtccagccggtgatgggcttgctgagtgaccgttttggccgtcgtccgtttgtgctacttggtagtgttgccctgtttgtgttggcgatcccggcgtttattctgattaacagtaacgtcatcggcctgatttttgccgggttactgatgctggcggtgatccttaactgctttacgggcgttatggcttctaccttgccagcgatgttcccgacgcatatccgttacagcgcgctggcggcggcatttaatatttcggtgctggttgccggtctgacgccaacgctggcggcctggctggtcgaaagctcgcagaatctgatgatgcctgcctattacctgatggtagtggcggtggttggtttaatcaccggcgtaaccatgaaagagacggcaaatcgtccgttgaaaggtgcgacaccggcggcgtcagatatacaggaagcgaaggaaattctcgtcgagcattacgataatatcgagcagaaaatcgatgatattgaccacgagattgccgatttgcaggcgaaacgtacccgcctggtgcagcaacatccgcgaattgatgaataagctgaaacggatggcctgatgtgacgctgtcttatcaggccaattgaactcttaaggttcacttaatctctgacgcgcatactctcctccaggttaacggaggagagtgcaatgaaaaaccgtgtttatgaaagtttaactaccgtgttcagcgtgctggtggtcagcagctttctttatatctggtttgccacgtactgatctttcttcagccgtacccaggcccgcgtgccggaagtctcttgccggttttgcaggaaaaactgcccgtgatgcaactgtgtaatgcggctgacaatacttaaccccagaccaatcccgccataacggctgtccatacgtacaaacgctttactcaactccccgcatttactctcatcaatacctggtccttcatcttcaactgccatgaccgctccgtcatcttcttgcagcttaatcataatgttgctgccttgcgggctgtaacgatgggcgttttctaccaggtttcgcaataacatccgcagcagggttgcatcaccctgaacggtgatgtcggcggcgctctctggcaatagcagggtttgctgtcgctggtcgagcatggtactgagttcgtcatacgaggggagaatgacatcttccagcagttttacatgttgataattaccggaagaaaatgactgtccggcacgcgccagttgcagcagctgggagacgctctccatcatctgatcaagccgtgccactaacggtgctacatcaatgtgatgcgttttcgccagcagttccagatgcaaacgcacccccgccagtggcgttcgcagttcgtgcgcgacgtcagcggtaaacaacctttcgttatccagcgtgctggtcaggcgactgaccagatcgtttaacgccgaaaccaccgcttcgatttcgagggtggcgctgtgaatggcaatgggcgttaagttgtcggcggtgcgcgcttccagctctttttgcagctccgccagcgggcgggtgatgcggcgtaccgcctgatagcagataaatagcgtcaggctgaccataaagacgccggggacaatcaggctggcgaccgcctcgcggatctcacgcatgatgtggcgatcgttgttgcgattgtcgcgtagcgcctgctcaaacagctgaatctgctctgtactttcatgccatagccagaagacgctgatcagctcaaacaccaacaaaatggccccgatggtcaatatcagccgttggcgcagcgatattggtcggcgcagaaaatgcatcagattcaattagttttcctcattcgcgaccagcatatagccaaagccgcgcacggtgcggatacgggctttgcccactttgtcgcgcagattgtggatatgcacttccagggtgttggtcgagggttcattgtcccagttatagatgtcgttgtagagaatttcccgatgcaccggactgcctgctttgagcattaaccgtgacagcagagcatattctttgggcgtcagaatcaactcttcaccgcccatccatacctgacggcgacccatgttcagcgtcagattgccaacaatcagctcactttcgccctgattattatggcgtcgtagcagggcgcggatacgggcatgtaactcttccagcgcaaaaggcttcaccagatagtcgtcggcaccgacatccagcccggcgattttgtcggtcagcgtatcgcgagcggtgaggatcagtaccggcagggtatattttttctgccggatacgggcgagaaaatgcagtccatcttcgtcgggtaaccctaaatccagtaccaccaggctgtaatgacctgcctcaaggctttgttccgccatccgcgcggttgtcacgccatcgcacgcgtagccttcggtttgcgccgccagaatcagtccctgcaataacagcgtatcgtcttcaacaatcagaattttcattcactcactctcctgcaagtttgcagaatatcatccgcagcctggtaatacttcgtctcaacgccagttaatcccaatagcgtggagaataaattgtcttgtgaatagtgttgcgtttgcgcctgtttttgcaggcagttctggtcaacctgataccgtttttgataatcctccgacagccacagcagcatcggcacctgtttttggctatccggggcgatggcataaggcagaccgtgcagatagatgccattttcacctaacgattcaccgtggtcagaaagataaaccaggctggtggtaaatttatcctgatgttctttcagcagattaatcgctttatcaacaatatagtcgacgtaaaccagcgtgttgtcgtaagtgttcaccagttgctctttggtacaggtctggatctcattggtgtcgcaggttggggtaaatttcctgaactgaggcggatagcggttgtaataggtcggaccgtggctgccgatggtgtgtaagacaatcacgccatcaccttgcaggttattgatgtactcttcaagcccgtggaacagcacttcgtcatagcattcgccgttgatgcactgatcaggtagattcagcgcggtgacgttctggtgaggcacgcggtcgcaggcacctttacagccgccatcgttgtcattccacagcacgttgatgcccgctcgctgaatgatatccagcacgccttcctggtgctgtgccagctcttctttgtagtgctcacgcggcatatccgagaacatgcacggtactgaaactgccgttgccgtgccgcaagatgcggtattagggaaatagaccacgttatctttcgccagccgcgggttagtttcacgcgggtagccgttgagggagaagttctccgcccgcgaggtttcgccgacaatcaggatggtcaaatttttacgtttttcgttctgcattaacgggttgcggtgcgcgtcttcaccaattcgcaccagcggcagatttgccagtcgctgatgggagtaccatgaccagctggcaacaatgctgttagaggggcttaaggatttcaccagctctttgttattgcggaacaacgaggcgtagtctttataaaacagtgcggcgaccagcaaaatcagtagtacagaaaccagaatattggctccacggaaaagaacactgcgcagacgcgaggtggcaggtttgatttttatccagcaggcaatcagcgcagcaagcacgccgctgaatcccagcgttaataacatttgcggtgtcatcagcgcataactttctgccggagtggtatcaataatattggcaatcatcgagcggtcgatgacgatgccgtaagtcattatgaaatattgtgcagccgcgccaaccagaataaacaggcaggccagtggtcgattaagccataagaaagagcttagtgtcaggacaatattaatcacgctgaaagcgacgaccggcatcgacaagaaaaccagtacgttatgcagcgaatccagcggcagcgcctgcaacacctgtttaaaaaaggcaatattcaggcagatagagatataaaaagcggccaacaatagccaggcgagtaaattcaaagagggtctttttagtaggcgcttcaacatcacggtgtttccatcgaacaaagtgcgcatatgctcgcaaagcaaaattaagccaaccttaagttcttaaggttggcttttatgtttgctggattaaggggaattaatctttgcttattggtgcatctaagggatacgggtttttatgtagccggttgtaattcagcgcatacatggcggtgatgaccatcagggtgacaaatgaccacataacctctttcgctccggaccccaccacggcccagatgcagtagaggaaggcaatggtagtaactgccagatatgccgggcgtgctttaccaaagtgaccgtgtccgagcagcagtaacgccgcacaggtgtaaagatatggcaccagtgtaaagatgaccgagacggaagaaaccagaccgaactctttggtcgcgtttggtgaaatgctgctgagctggaagatggtcatcaaaataccgacgataatcagccccgccactggcgtacccgctttatttacacgggcaaaaatcggtgggaacagtccgtcatcggcagcggctttcgccgtttgacccgccagcaacgtccagccgcccagtgaacctaagcaacccgcagctgcgcagaaggaaacaatggccccggcggtgtcacccaacgccatccgtgcggcatcaccgaatggcgaagcagaaacgcgcagtgcggcattagggatcatccccataatcgcggtggtagaaagtacatagcaaacggcggcaatcaataccccaccaatggtggcgatagggacattgcgtttcgggtttttcaccacacctgcggcaacggaggcactttccacaccgatgaacgaccacagcgtaacgttaagggtactttgaattgcaccgaaggtgcccaggccgctgacgttccatgccgccatataggtttcaccacggaaccagaaccagccaaatacggcaatcccgacgatggggatcagcgccagcacggtggcaactgcctgcacacgggtgatcattttcggaccgacaatgttcagcaggacgaagatccacagcaccacgacgcaggtgatggttaataccaatggatctttcagaatcgggaagaagtaacttaaatatcctacgccaatgaccaccatggcgatattgccgatccagcaggccagccagtagaggacgttggtttgataaccgagaaacgggccaaagcagcggcgggcgtaagcgtaagaaccaccaggacttgggtcgaggaacgacattttggcgtataccatcgagagccccagtgcaccgataatcgtcaccaaccatccataaatggcaatcccgccagtagaggccaggtttgcaggtaacagaaaaacacctgaccccataatattccccgacaccatcagggtgacggggattaagcccactttgtgagcatcagcatccgaagacataattaaactcctgcgaaggcgagcttcgtgacaataaattacgtcatatcatacgcctgcattcgatagttgaattattatcgaccgggttatcgctgatgccgttattaatatagctcttcgttaaggttaaaaatcaggcgacagtgcgttctctgtgctgactaacataatgcagcggcgtcataccgtagaagtctttaaagacagaaataaagtacgacgtactgttgtagccgcaggactgtgatacctgagagatatttttaccgtccatcattaattcatttacggcataacgcatgcggcaggtggtgattatttggctataactggtgttttcgcttttcaactttttctttaacagacttgggctaagacataaacaactggctaccatactaagattccagtctttgtgaatatcgctttcaataatttgataaacgctgtcacttacacaattacgtaacatatacatcattaatgaaacgaattttttactgtcgagaaaacgggatagcaccgtgaataataatgcgcgtgttcgttccttttctgactcagtttctgcgggcatcatgctgtgttgcgcggcaacgcgaaagacgtctggcgtcaggcatggcagggtgagtatgggcgtagcgctacgttgccatactggtatttgcgagagatctttattcagaaaccggaggtaatctttgatgatgtcgtgactaatatgagcaaccaaagtgttgttaagagaggagacgtcgataatattattttcacaatttaataacgccatatggttagctttaaggctaataggttctttcccattcacccttatccagacatctttttcagtcaataaaacaatacaaggttggtcgctgcaaatcctcatacatgtactcctgagtgcgaataaaagaccagttctcgctaaagcaaagcgataccgggaaatggttatataattgtatgatgaatataaacatgcataaaaataacgagttttactaatagtacaaatttttatagtaatttctcatgtacatatttttttacaggataaataacaggcaaaaaaaagcgcggggtggggccgcgcaaaaagtatgacatttttgtttgcagcaatttttatgaaaacgttgccatactcaaaaggcctaaggccaggcggcgtaatgttatttaaacaattacgccttcagcggaatagtggttacgctttcacgcacataacgtggtaaataccgtcaataatttcagtcccttcagtttcgtgttcaaatccagggaaatggtggtcccaggattgcagcgagcgtaaataacttacttgcggactgtttttatcgccgaagttttcaccagacagcagcatcgggattcctggcggatacgggataactgagtttgccgcgatgcgtcctggcagattttcaatggataccagttcgacattgttgtcgacaatcgcgttgtacgcttcacgcggggtgacttccgccaccggcaggccggaataggcttcgttcaaccgtgcgccagggttgttttctttcagccaggcaaacatggtgtcacccagatcgtgaatccccatgttcgcgtaagtgtcaggatattgttcaacaagttccggcatcacctgcgccagcggtgtgttggcgtcatagtggcgtttgaaggagcaaagggtgttaaccagagttccccatttcccacgggttacgcccatagagaacaggaacataatttggaagtcagtggtgcgggtaggtacaatgccgtggcgaccaagccaggcagtgaccagcgccgccggaacaccggtttcttccagttcaccatcttcacccattcccggagcaaggatgctgactttaatcgggtcgagcatactccagttatccggaatatctttgaagccgtgccagctttcgcccggatgcattacccagcagtcctgaacggtggtcagcagtttggttggtgcgtcagcaaagtcataggttttgccggtttgtgggtcggtgacgacttctttgttccacggtttgaagaaccagctaccgtcagcggtgaactctttatatagccgcgccatcgcctgacggaaatcaaccgcttcgtcaatcacttcctgtgtcagtgacaggccgctgttgccgtccatcatcgacaccgccacgtcgttggatgcgcagatggcatacagcggggaggtggtggcatgcatcatgtaggcctggttgaagcgggagaagttaatcgccccacgaccttcacgtacatgaatataagaagcctgtgacagcgcattcagcagtttgtgggtggagtgggtggcgaaaacggtaggaccgttgtgatcgccaggttcgccgcgcatggcatagtgatcggcatagatcgggttgaaacgtgcatagccgtaccaggcttcgtcaaagtgcagacgatcggaggttttttccagcagatcctgcgcttctttagcgttataacacacgccgtcataggtgcagttggtcaccacgcagtaagacggtttttgcccggctttgtctttggtcagcgggctttcactgattttcttctgcaaggtttcaggttgcatttcctgcggatagattggcccgataatgccgtagcggttgcggcttggcaccatatagaccggtttcgcgcctgtcagcatcaaaccttgttcgatggatttatggcagttacggtcaacgaccacgacatcgttatcggtcatgcaagcctgcatgatggtgcggttagagccggaagtaccgacgactaccgaccaggagcgatcggcaccaaatacgcgtgcggcatatttttcgctttcgccaaatgcgccagtatggtcaagcaaagaaccgagggaagttcgttcgatgcccatgtcggtgcggaacagattttcaccatagtagtcatggtagaaacgtccggcgggtgttttggtaaaaccaacgccgccctggtggcctggcgctgcccaggaatattcatggatgtcactatatttcatcagcgcgctgaacagtggcggcaacagctgctggcggtagcgggtcatcgcggcaacggcgcgtccggcgataaagtcggcggtatcttccagaatccaggcgaattcatcgacaagctccagcaggtcgcgatccattgcggcgagggctttttcccgatcgcccaacaggaagaccggcacgttttgttggcgctcatgaagcttaccgatcaattgtctgacgttttgatgttcgtccggatgttccatttgatagctgaacatcaggcagtcaatggcttcgtttgaagagagaatggcaaaaccatcatcaaaggaggtggatttaatcacggtaacattttgctggcttaaagcatctgccagacgctcaacggcgttaccgacccaggtgtcttgatggagaaactcgctttcaacaattaatactttcatcattgcttacccggttatgaaggaatcttcgttgcgggcaagtatcttccggccttttcgggctgtaaagcgcgtgaaaaacaaacatttttgaaatatttagttttataaacaatacgttatgtgattattttaaattattttcactgcttattatcgacggctaaactatttttttggctgatactgatatcgtctttagccgggaaacgtctggcggcgctgttggctaagtttgcggtattgttgcggcgacatgccgacatatttgccgaacgtgctgtaaaaacgactacttgaacgaaagcctgccgtcagggcaatatcgagaatacttttatcggtatcgctcagtaacgcgcgaacgtggttgatgcgcatcgcggtaatgtactgtttcatcgtcaattgcatgacccgctggaatatccccattgcatagttggcgttaagtttgacgtgctcagccacatcgttgatggtcagcgcctgatcatagttttcggcaataaagcccagcatctggctaacataaaattgcgcatggcgcgagacgctgtttttgtgtgtgcgcgaggttttattgaccagaatcggttcccagccagagaggctaaatcgcttgagcatcaggccaatttcatcaatggcgagctggcgaatttgctcgttcggactgtttaattcctgctgccagcggcgcacttcaaacgggctaagttgctgtgtggccagtgatttgatcaccatgccgtgagtgacgtggttaatcaggtctttatccagcggccaggagagaaacagatgcatcggcagattaaaaatcgccatgctctgacaggttccggtatctgttagttggtgcggtgtacaggcccagaacagcgtgatatgaccctgattgatattcactttttcattgttgatcaggtattccacatcgccatcgaaaggcacattcacttcgacctgaccatgccagtggctggtgggcatgatatgcggtgcgcgaaactcaatctccatccgctggtattccgaatacagcgacagcgggctgcgggtctgtttttcgtcgctgctgcacataaacgtatctgtattcatggatggctctctttcctggaatatcagaattatggcaggagtgagggaggatgactgcgagtgggagcacggttttcaccctcttcccagaggggcgaggggactctccgagtatcatgaggccgaaaactctgcttttcaggtaatttattcccataaactcagatttactgctgcttcacgcaggatctgagtttatgggaatgctcaacctggaagccggaggttttctgcagattcgcctgccatgatgaagttattcaagcaagccaggagatctgcatgatgtctgcacccaaaattacatttatcggcgctggttcgacgattttcgttaaaaatattcttggtgatgtgttccatcgcgaggcgctgaaaacggcgcatattgccctgatggacattgaccccacccgcctggaagagtcgcatattgtggtgcgtaagctgatggattcagcaggggccagcggcaaaatcacctgccacacccaacagaaagaagccttagaggatgccgattttgtcgtggtggcatttcagattggcggttatgaaccttgcacggtgactgatttcgaggtctgtaagcggcatggtctggaacaaaccattgccgatacgttggggccgggcggtattatgcgcgcgctacgtaccattccgcatctgtggcaaatttgcgaggacatgacggaagtctgccccgatgccaccatgctcaactatgttaacccaatggcgatgaatacctgggcgatgtatgcccgctatccgcatatcaaacaggtcgggctgtgccattcggtgcagggaacggcggaagagttggcgcgtgacctcaatatcgacccagctacgctgcgttaccgttgcgcaggtatcaaccatatggcgttttacctggagctggagcgcaaaaccgccgacggcagttatgtgaatctctacccggaactgctggcggcttatgaagcagggcaggcaccgaagccgaatattcatggcaatactcgctgccagaatattgtgcgctacgaaatgttcaaaaagctgggctatttcgtcacggaatcgtcagaacattttgctgagtacacaccgtggtttattaagccaggtcgtgaggatttgattgagcgttataaagtaccgctggatgagtacccgaaacgctgcgtcgagcagctggcgaactggcataaagagctggaggagtataaaaaagcctcccggattgatattaaaccgtcacgggaatatgccagcacaatcatgaacgctatctggactggcgagccgagtgtgatttacggcaacgtccgtaacgatggtttgattgataacctgccacaaggatgttgcgtggaagtagcctgtctggttgatgctaatggcattcagccgaccaaagtcggtacgctaccttcgcatctggccgccctgatgcaaaccaacatcaacgtacagacgctgctgaccgaagctattcttacggaaaatcgcgaccgtgtttaccacgccgcgatgatggacccgcatactgccgccgtgctgggcattgacgaaatatatgctcttgttgacgacctgattgccgcccacggcgactggctgccaggctggttgcaccgttaaaacgcgactaaacgctactgcgccgggggatttattccggcgcacacctctgacgataccaataacagaaggcgggcgttggtaacagcgacccgataccctatgagcatttcaatgactacaaaactcagttatggatttggagcgttcgggaaggattttgcgatcggcattgtgtatatgtacctcatgtattactacaccgatgtcgtcgggctgtctgtgggtttggtcggtactttgtttctggtggcgaggatctgggatgctattaacgatccgattatgggatggattgtaaatgctacgcgatcgcgatggggtaagttcaaaccctggatcctgatcggtacgttggcaaactctgtaatcttatttctcctctttagtgcgcatctgtttgaaggtactactcagattgtctttgtttgcgtgacctacatcctctggggcatgacttacaccattatggatattcccttctggtcgctggttccaaccatcacgctcgataaacgtgagcgcgaacaactggttccttatccgcgtttttttgccagtctggcaggctttgttacggcaggtgtgacgctaccatttgttaattatgtcggcggtggcgatcggggatttggctttcagatgttcactctggtactgatcgccttttttattgtttcaaccatcatcactctgcgcaatgtgcatgaagtcttttcgtcagacaatcaaccgtctgctgaaggaagccatctgacacttaaagccatcgttgcgctaatttataaaaacgatcagctttcatgcctcttgggtatggctcttgcttataatgtagccagcaacattattaccggctttgctatctattatttctcatatgttatcggtgatgcggatttgttcccctattatctgtcgtatgcgggagctgctaacctggtgacgttagtattcttcccacgcttagttaaatcattatcccgacgcattttatgggccggagcatctattcttccggtgttaagctgtggtgttctcctgttaatggcattaatgagctatcacaacgtcgtcctcattgtgattgcgggtattttgctgaatgtgggaacggcgcttttctgggtattacaggtcatcatggtggcagatatcgttgattacggtgaatataaactgcacgtacgctgtgaaagtatcgcttactccgtgcagactatggtggtgaagggcggttcagcctttgcggcttttttcattgcggttgtgttagggatgattggctatgtaccgaatgttgaacagtctacgcaagccctattaggtatgcagtttattatgattgctctaccaactctgtttttcatggtaacgctgattctctacttccgtttctatcgcctcaatggtgacacgctgcgcaggatccagatccatctgctggataaatatcgcaaagtaccgcccgagcctgttcatgctgatattccggtcggtgcagtgagtgatgtgaaagcctgacgtggacaatagctaacgaaaatggcctgatgcgatatgtttatcaggccacgtcttaatgtaatgctttggatttgcaaattttgtagaccggataaggaattcacgccgcatccggcatcaacaaagcgcaagttgttatccggttatcaagccaaagcgccgtagctggcggcaatgaaagcgagcgaggaatatcaccgtcgttaatgcgccaagcagcgcgcagaacatatcggattgcgtgtcccactggtcgccctgggtgccgagaaaatcatccgctccctgacccattgccagcgctgcccaccactcgattaattcatacatcgcgcttatcgccagcgccacgcagcagaccaggaacgccaccattttacgtccgcgcacgtacatcccgcgaacgagaatttctcgtgccaccagtgcaggcaccagcccctggaaaaagtgccccagcttgtcatacggattacgactcaaccccagccattcctgcacctcaaaaccaacggggactttcgcgtaggtgtattgtccgccgaccatcaggatgatggcgtgaaggaaaatgagcgtatagagcagcggcgttaacggataacgtctggcggtggcaagcagtagctgcacgacaataatcaccggtgtcacttccatcagccaggtgagtttgtcatgggccgaaatgccggtataaatcaggattaacgttagcgtcagtgcgctggtgttaagaattaacggcttgagtgtgcgggtcatggtgagttcgcaaatcagggaaaatactgactattcaccagcaagcgtgaaattacaatcgcaaaagaggtggcccagggggatcacctggcagcatgctgccaggcgctgggccgaagaggttacttagtgcagttcgcgcactgtttgttgacgatttgctggaagaagtcgttacctttgtcatcgaccaggataaacgccgggaaatcttctacttcgattttccagatagcttccatacccagctccggataagcgacgcactccagatgcttgatgctctgctgcgccagtaccgccgccggaccgccgatgctaccgaggtagaagccgccgtgtttatgacacgcgtcggtaacctgctgactgcggttacctttcgccagcatgatcatgctgccgccgtgggattgcagcagatccacgtaggagtccatacggcctgcggtggttgggccaagtgaacctgatggataaccggcaggggttttcgccggacccgcgtagtagatcgggtgatctttgatgtactgcggaagttctttaccggcgtcaatcagctctttcagcttggcgtgtgcaatatctcggcccacgataatggtgccggtgagcgacaaacgagtggataccgggtattgcgaaagctgggcgaggatctctttcatcgggcggttaaggtcaactttcaccgcttcgccttcaccggcctggcgcagttcttgtggaatgtactggcctgggttgtgttccagtttttcgatccagataccttcgcggttgattttcgctttaatgttacggtcagcggagcaggagacgcccatgccgaccgggcaggatgcgccgtgacgtggcagacggataacgcgaatgtcgtgcgcgaagtatttaccgccaaactgcgcgccaagaccgagtttctgggcctcttccagcagttcctgttccagctggacatcgcggaacgcctgaccatgttcgttcccttccgtcggcagttcatcgtaatagtgagcgcttgctaacttgacggttttcaggttggtttccgcagacgtaccgccaatcacaaacgcgatatggtacggcgggcaggctgcagtaccgagggtacgcattttctcgacgaggaagtttttcagtttgccgggagtcagcagggctttggtttcctggtagagatacgttttgttggcagagccgccgcctttcgcaacgcaaaggaatttgtactcatcgccatctaccgcgtacaggtcgatttgcgcaggcaggttagtgccggtgttgacctctttgtacatgtccagcgccgcattctgtgaatagcgcaggttatcttcgatataggtgttatagacgcctttcgacagcgtttcttcatcaccgccgccggtccacacgcgctggccttttttaccgacgatgatcgcggtgccggtatcctggcaggtcggcagcacgcctttggcggcgatttcggagtttcttaagaattgcagcgccacgtacttgtcgttttcgctggcttctggatcgtgaagaatagccgcaacctgtttctggtgtgccgggcggagcataaaagaagcgtcgtgaaaggcttgctgcgccagcagggtcagggcttctggttccactttcaggatggtttcgccgtcgaagtcggcaacgctaacgtaatcggaagtgagtagatagtattcggtattgtctttccccatcgggaaaggtgcctggtagataaagggtttgtttgacatagcttccagcctgtaactctgtatttgttattcgaaaatggcgtgccgcgtagtcacgggcggcacgcaaagtgcatttataagaacccgtacatcgcggcgaagatccagccgaagacgcacgatacgctcacaccaatcaaccccggcagaataaagctgtggttgatgacgaagcgaccgatgtgggtggtgccggaacggtcaaactgaatcgctgccagatcgctcggataagtcggcaggatgtaataaccgtagcaagccggtgctgaagccacgatgtatgccggatcaacgccgatcgccagcgcgaccggaacaatcgccgccagcgccgcagcctgagagtttacaaacttggaaaccagcagcagaacaatggcataggcccacggatactctttcaccatttcacccagtacgccctgaatttcagacatatgcgcaccgaacatggtttctgccatccatgcgataccgtacaccgccacgatggcgatcataccggaacggaagacttcgttttttgagatagacgcgggattggttttggtcaggataataatcagcgccccggtcagcagcataaacatctgaataaccagtaccatcgacagcggtttgccgccgaaggatggacgcaggtccgaatcagcaccaagaagggcgactacagcgattgccccgaggaaaatccacattgccagccagttgcttttcggcagttttttatccagcagcgtcgcggtatcaccgtaaacatactcacggttttccggtacggagatgaatttctggaactcttcgtctttatccagatctttaccgcggaaccagctgaagataccgatcgccaggataccgattaacgtcgatggaatggtgattgccagcagatcgaggaactcaagatggcgaccatcaaaggtgacattacccagcatcgcaaccagagacacgaccgcaaccgacaccggactggcgataatccccatctgtgcaccgatagaacttgccgccatcggacgttccggacggatgttgttcttaatggcgacgtcgtagatgatcggcagaatggtgtaaaccacatgacccgtaccgcaaagaatggtcagtgtacaggtcacaaacggcgcgacaattgagacatatttcgggttgcggcgcagcagcttctcggcaatttgcagcatgacatcaagaccgcccgaagcttgcaaggtcgccgatgccgccaccaccgcaatgataaccagcatgacatcaactggtggtttacctggctgaaggtggaagacgaagaccagaatgaccagaccgataccgcctaataaacccagcgcgataccaccctttctggcaccataaaacagacatatcagtattatgataagttggatagtaaataacatgtgtgaaccctcgcgataatcctatttaaatttttgctgaatagatcacagtcacgttctgttttgtatgaactgttttcagagcctgactaaatatccgtttggtcgttaccggctttagcaaatacctcacagtgaatattggctgattaaagcagcggcaaatttatgcactgtgataagcggctttttcagagagaaagactctctggcgatgggtttatagtttgtactgcgcagatgttaatgttttgtttgctgttatcttattgatatttatcggtctattttttgttctcagggcagatgtcattaggtttatagattaatctgatctacccatttgtgggtaaaaatacacataatgcgggtgacataatagttaattaacttttgttagcgttttgaaattaaaaacaccgttcacctgaagagatattaatttttagcgatgatggagggataattatatttgatctggcacaagttttactgatgaaggatgtaacttgtgccaggggtattttgcattacggtaataattattacttacagataaccagcgatccgttattggcaatattgtttcagtagtgagtagtgttctgcctgaatacggtaacggtaaactggacgccccgtgacgccataatggatactggtgaacaagatgtggcagttgaccagccagatgaggtatttacggcaggaaacacgcgaaatgttaacctcgttggctagctcgtcggttgaaaattcatagtcctgatgcgcgtcaatccactggcacagtgtgcgtaacgtctgcggcgttaagccttttggcaagcgacgaggatcctgttcgttggagctgctgccgtggattagctgatcaagctcggcctggtcataatactgatgtttttccagcgccattttcttttgccgccagccggtgagcgcctcttcaaagcgggaagcctggaagggtttgatcaggtaatccacgacaccgtaatgcagcgaatctttaatggttgccgcatcggctgcggaggagatgacaatcacatcacttttgcaacgcgcgttatgcaggacaggcagtaaatcgagcccgttctctttttgcatatagatatcgagcaatatcaggtcgataggcgtatcgctattgaagataatctctttggctttctccagcgtcgaggctgttccacagcattgaaagcctgggatttgtgctacgtatcggcgattcagctccgcgaccattgcgtcgtcatcgataattaatacattgatcatctgttcgacctctccccgtcccagggtatctggacaaaaaattgtgtgaaaatcccgggttccgattccacggcgatgctgccgccgagattttctacctgttgtttgacaagtgctaaaccgacgcctcgctcgcttccttttgtcgagacacctttgtcaaaaatgtgatcgattttatcgggtgcgatccccggtccatcatcattaacttcacagtgcagccagccgtgacggtagtgcaatgttacgctaatttcgcctccgggttccggccctaatgcctccagcgcgttttctatcagatttcccaacgtggtaatcagcgtcgcgacctggtcctcactgccgctgtctggcagctggctttcactgtttaaaatcagcgtatggcctaaatcggtcgcgcggttaatcttgctgattaaaaaaccagcgataaccggagatttgatcttacccagcagagagccaatctcttcctgatagttattggctgttttgagaatgtaatcttccaactgcttataactcttcagatgcaataatccgagaatcacatgcaatttattcataaattcgtgggatcgttcacgaagtgcgtcagcatagttgaccagaccgtcgagtcgctgcatcagtttacgtacttcagttttgtccctgaaggttgaaatggcaccgatgataacgccattactgcgcaccggaacggtgttgatcagtaatagccggtctttaatcgtaatctcttcgtcgcggcgcggggtaccgtcgcgtaacacttccgagacatctaccacctgtgaccatgagtggcttagcgtcgacagtttctcatcgtcctgcgacttacggtaattcagcaattcttgtgcggcatcgttgatcagcgtgacctcgccgcgatcgtccacggcaacgacgccttctttgatagactgcaacatggcctggcgttgctcaaacagcgtggagatttcgtagggttccaggccgaaaaggatttttttcagtaccttaaccagaatgcaggtgccaatcagtccgaccagcatgccaaataataccgaccagataatgctccagcgactgtcattgatctgttgggtcacacggcttaactcaaggccgatcgccaccacgccaatttgtttatgattttcatcgtagatgggggtaaatacgcgtaaagcctgcgccagaaaaccgcgattgatagcgacattttcttcgccattcagcgctttaaggatgtcatcacctttaaatggctgaccaatacgctgggcttcaggatgcgagtagcgaagactttgcatatcggtaacgacaataaacagcagatcgttgcgtttgcgtacggcttccgcgatggcctggatgccactctcctgcggttttttctgcaagccctgacggatttccggcgagtcggcgagggtacgcgccactgccagtgccttgttggctagcccatctcgcgtcatatcactgatttgcgagaagtaaatcagatgcaccaccaatagcaccgagaacagtaccgcactgaccattaagatcactgtggtactcaatttcatcggacgtttgcgtaacatgcggtagggcaatgaatgtctcatcagcttccttgtgtgacaaatttcttaagcattatctctgatgaggcgggtaattcaaagggagtaagaatgattggctatataggggaagagactctggcaacggaaactgccagtgctgtatgaagattccggggctatgcttatagcgataatcatactgatgagagagggaaggtcatggatcaggcgctactggacgggggttatcgctgttataccggcgaaaagatcgatgtctatttcaacactgcgatatgtcagcattctggcaattgcgtacgtggcaacggcaagttatttaatctcaaacgaaagccgtggatcatgccggatgaagtcgacgtcgccactgtggttaaagtgattgatacgtgcccgagcggcgcgctgaaataccgtcataaataagcgagggtaaaatggaaatacgcgaaggccacaataaattttacattaatgacaaacaaggcaagcaaatcgctgaaattgtctttgtgccgaccggagagaatttagcgattatcgaacataccgatgtcgatgaaagcctgaaagggcaagggattggtaaacagctggttgcgaaagtcgtggaaaaaatgcgtcgggaaaaacgaaaaattatcccattatgcccatttgcgaaacatgaatttgataaaacgcgggagtatgatgatattcgcagttgatgggagagtacagagtcacgatatttttcattctctccgcgatgtgatgcaggagagcatctgaagggtagggggatgcacaaagaatgggcagagagcgcgtttttttgtcccaagtcatcccctttactgagcaaaaaaaagaatatctcctatatgagaatcatcaatcggggttaataagttttgcgtccccagagcgtttaatattgataggagtcatattatggaaggtaaaaacaagttcaatacttatgttgtttcttttgattatccatcatcttattcctcagtgttcttaagattaagatcattgatgtatgatatgaatttctcctctatcgtggctgatgaatatgggataccacgacaattgaatgaaaactccttcgcaataacgacatcgttagccgcaagtgaaatcgaagatttaatcaggctcaaatgcttagacttaccggatattgattttgacctcaacattatgacagttgatgactatttccgtcagttttacaagtagccaggaaggataagaagaacataaaaaatggcactattctctaaaatattaattttttatgtgattggtgtgaacatatcctttgtcattatctggtttatctcacatgagaaaacacatattcgtttacttagtgcattcctggtcggaataacctggccaatgagtctgcctgtggcattacttttttctctcttttaggagctgtagttgagtggacccgctggttatcgtgaaacgaagcgtctctcctcaaaactggatttgcggaacgatgaacgaagcagtcgcctgactgcttcgttcattaaagtgaaatttatttctgtgggcgcatcgccgggaagagaataacgtcgcgaatagtatggctgttagtaaacagcataatcattcggtcgataccaatacccagaccagcggttggcggcagaccatattccagcgcagtcacgtaatcttcgtcatagaacatggcttcgtcgtcacctgcagctttagcattaacctgttcctggaaacgttcagcctgatcttctgcgtcgtttaattcgctaaaaccattaccgatttcacgaccaccgatgaagaattcaaaacggtcggtgatttccgggttaacatcattacggcgtgccagcggggacacttctgccggatattccgtaataaaggttggctgaatcagatgtgcttctgccacttcatcaaagatctctgtgacaatacgtcccaacccccagcttttctctaccgtaataccgatagattcagctaatgctttagcagcatcaaaattatccaggtcggccatatcggtttctggacgatattttttgattgcttcgcgcatggtgagtttttcaaacggtttgccgaaatcaaacacatgctcgccataagtgactttagtggtacccagaacctcttgtgccagggtgcggaacagtgactctgtcagttcaatcaaatcgtggtaatccgcatacgccatgtagagttccatcattgtgaactcaggattatggcgaacagaaataccttcattacggaagttacggttgatttcgaatacccgttcaaaaccgcctacaaccagacgtttcagatacagctccggcgcgatacgcagatacatatctaaatccagagcattatgatgggtaataaacgggcgagcagatgccccacctggaattacctgcatcatcggggtttctacttccataaagccgcgcgcgaccatgaattgacggatagcggccagaatttttgaacggacaacaaacgtttgacgggatttatcgttagcgatgaggtccagataacgttgacgataacggacttcctgatcctgcagaccatggaatttatctggtaaaggacgtagtgctttagtcagcaggcgcagctcagtacagtgaatggaaagctcacccgtttgcgtcttaaacagcgtaccgcgggcaccgataatgtcacccagatcccattttttaaactgatcgttataaacaccttctggcaggctatctcttgcaacgtacagttgaatacggccaccgacatcctgcaacgttacaaaggaggctttccccatgatacgacgggtcatcattcggccagcaaccgagacttcaatgtttaaggattccagttcctggttatccttcgcatcaaactcttcgtgcaactggtcagaggtatggtcgcggcgaaaatcattgggaaacgccacaccttgctgacgtagtgccgccagtttttcgcggcgatttctcagttcatcgttaaaatcaatagcctcattggctccccgtgtttcttgttcagacattttggttcctctaaatccagctttcaatttagcgtagataaagagacagatcggtacactgtattatctgcctcgactattagtaactcagtttatcttatcgaaactaacgcttacctcaagttgatatcactaataaataaccatcaaaatggtttaaatgacttattaatctcgatttgttagtgttataaactgaaagttaatttattcataaccaattgtttttacgacagttaatcgttgctctcctgtatcatattcgtcggcgtgctaaacagaaaacgggtagcaaaggccaatacgacgatgatcgcgacacaagccaacgtccactctcccatctgagaaaagaatcgctggtaagctgcaattgccataccgctaatttgcgactctgtcgtctgctgtgccacgacgcctgccagccagttggcgaccgcgcctgttgccagcatataaatcccggttaatacgccagacattttcagacgcgtgatttgcgcaatcgccaccgggtcaataaagagttcggcaaagcccattagcgccagcccggatatcatcacgcccattgacgcttgaccgtcagccgctgcatgtcgggcatcaaatgccaacaacataaagccacaagccatcagcagtaagccaaaggcaaacttcagccagacgcgcaatgttgagttgccgcggctttctggcgacgccagccaggccagtacaaccccagcgagcatcaccgcaattgcattcaccgactggaatagtgctgtaggtacttcaatattgaatgcctgacgattcacaaagcgatcgataaacaagctgatggtactgccgccctgttgtgccagtacccagaacaatgtcccgacaaacatcaacaatacaatttgccaaagagcacggcgatgttcggggaatttgatcatcatgcgggcaatgatttgtgcggcaatgaggcaaacgatcgccagcaaatatccggaccagtcgttctccagcagcagagtaaaaaatactggggctaaacagagcatcaccactaaccagctccatactggtaaggcaaatttgacactagtgagcgcttttttatccatactacgtgtggactggaaatgacgatgaccgcttaagaaaatcaacaaaccgataaacatgccgccacccgcaagggcaaagccaacatgccatccataccactgagcagccaggccgcaggcgattggggctgcgatagaaccgatattgcccgcagcatacagcagcgaaaaaccgccatcacgtcgatgatcgttctcgtcgtagagctcgccaagcaaacagctgatgtttgatttgaataaaccgtagccacaaataatgattgccagcgccagatacaggctaaaggttgaatttgtatcaatacccagcaccacatggccaagggtcattaacagcgcgccggcaatcactgcagtgcggttgccgagcaggcggtcggcaagccagccgccgagaataggggtaacgtaaaccagagaagcatatgcgctgaacaggctgatggcatggttatcatcaaaaccaagctgatgggtgagatagagaatgagtaaggcacgcatgccgtaaaaactgaagtactcccagatttggatcgccacgatatagtatatcgcgcgcggctgtgagggtgttttcatgtgttctccttatgagcaaaaaagggaagtggcaagccacttcccttgtacgagctaattattttttgctttcttctttcaataccttaacggtatagcggccatcagcctgacggtatgcaccgtgaatatcggtttcaaagcccggatagtgagcgccgatttcacacagcatctgcaggaactccagaaccggacggctttcttcggtgatcatttcacccggcattaccagaggaactcccggcgggtacggaaggatcatattggcgttaatacgacctaccatttcgtcgaggtaaacttcttcggtcataccgtgcagctctttctggaatgcagcatacggagtcattaccatcgtcggcagcacttcaaatgcgcgatacatcagatccggcagattgtggtgaacaatcagtttgtggatattctgagccagttcctgaatacgcatgttttcatagaattcaggatcttcacgatacagagacggcagcatgtttttcacacgcaggttcaggtcgaacgcacgtttaaagtcagtcagagcacgcagcaggctcagtgctttggtcttatcgataccgatgctgaacaggaacagcaggttatacggaccggttttctcaacaacgatgccatgttcgtcgaggtatttcgccacgatgctggccggaataccaaagtcgctcatggtgccgtctttttccatccccggagtcagcagggtgactttgatcgggtcaagatacatgtgctcgttatcgatgtttttgaagccgtgccaggtgctgtcagaacgcagcggccagcattcagtcgtatcgatatgatccggctgccatacatcaaagaaccagccatcagattccgttctcagacgtttgatctctttacggaatttgatcgcacgttcaatagaaccgttgatcagacgcttacctgcattgcctttcatcatcgccgcagcggtttcagtggacgccacgataccgtagtgcggagaagtggtggtgtgcatcatgtaggcttcgttaaaggtttcttcgtttacgtcacctttaacgtggagcatggaagcctgagagaacgccgccagcagtttgtgagtggactgggtttcgtaaatcactttcccttctacacggccaccgctcataccgcatttaccttcgtaaatcggtgagaagttggtgtaaggcacccacgcggagtcaaagtggatggatttcacatccagtgttttcttgatgaagtcggtgttgtacagcagaccatcataggtagagttggtaattacagcatgtaccggccaggttgcgtttggtgtttctttcacgcgcttagcaatggtagcgtgctggaattcactctgtgggataccaccaagaataccgtaagcgttacgggtcgggcggaaatagattggcgtaacatcgctcatcatcatcaggtgggtcagcgatttgtggcagttacggtcaatcagaatggtgctgcctgctggagcagagtacataccaacaattttgttcgcagtggaagtaccgttggtcaccatgtagctgcggtctgcgttaaagacgcgagcgatatactgttctgcttctttgtgtggaccactgtgatccagcagagaacccagttcagatactgaaatggaaatatcagatttcatggtattcggaccaaagaaatcatagaacaggctacctaccgggcttttctggaatgcagtaccgcccatgtgaccaggagtacagaaagtatatttaccttcacgaacatatttaaacagtgctttagtcagcggaggcagaatagtgttgatatattcgtcagtggtctgcttgatcttattagcaatatcttcagcagcacccagcgcatattcaaagaagctaatctgtaaacgcaggtcattcaggcttacatcgagagtggaatacgtattagcgaacgcgtacaacggcaggttctcgttcattttgctaatttcttcgcacagctcgagattatatttatcccagtcaaaaataacgccgcacagacgcgcattgttttcgatcagttttaataagtcgtcacggtcgttcgggtaaacaatctggaagttcagacgttcaagcgcgcgatgaagttcacggatgggttcttctttaaaataaacccccatgtgattcaatattgcaataacgttcatagtcatatctccaggtaaaaaaggcccctcccaacacatgggacaaaatgaaaggaggagcctcggaaaatacttttaattaatgtgcgttagacgcggtgtggttatccattgagtggctctggcgctcgtgcattttgcgagcgtagaacatcaggataatcaggctgacgatgaaggtacctgccagctcgaaggagcttgcgcccatcagcgcgatgaagcagaacacgcaacccagtacagagcagatcaggctgacaaagttgcggatgttaacgccttcaaaacgaatcaggtcaacgcaagagtagaaatacggcagcatagtcagcagtactgcgataccggtcagttcaccgaacaggtcagatgctttaccaccggcagagttcatcagagtgataaggatcatcagggcagtcattttcactgcagccagcagcagaccttttttcggaataccgttgctgtcgacttcaccataaactttcgggaagttaccgtcgttagcggcacgtacacctgcctggcctaccaacatcatccaggagcccagagaagtcaggcacgcaaaggcggtgaatgcagaaaccagcggcgcagcccagttaccgaggatagttgaagcactgattgcaaacggagcaccggaagccgccattacagaagacggatacataccggaaagcacctgagtcgcagcgatgtaaacaatacctgctaaaccagtacccagcatggttgccagcggaacggtacgtttcgggtttttaaccataccagtacttacagctgcggattcaacacccacgaaggcccacaggcagagcagaatacttttaatgatcgcatgaccatcagtggtatccgcagtattccagttagctgcataagttgccgcatcaaaccaatgccagccaacaatagcagtcatcaccacaggaataagaaccagcaccagaccaatagtggttaaacggcttacccaagtaccgccgagcatatttacaaaggtaaatacccagacgatagcaatacaggcgatacccgccggaacaggatcatttaatactgggaagaaggtggaaagataagatacagcggtaataccaatcgccaggttaccaatccagttagcatggtaataaagaacacctgtctgaaaaccaaatgcaggggaaatttctccggcataagcaattgggccaccttgttgcgggttttttgttgccagtcgggcatatacatacgccagcgacattgcaccaataatagagataatccaaccccagatagcaataccaccgatacttgctaggttcgcaggtaataatgcaataccgctccccatcatattaccggcaacaacaccggtacaggcaaatagcccgatcttcttggcagaactcatgctcttctcctaatttcatttttgaatttggagtccgggtcatgatgtataactatttcctgaccagaccaaactggcgataagattactcacgaaaaaaggattaatcctaaagattaggtgaaataacacaaaagtttctgtaagtgagaacttgaggttttttattaacacatcaggatcgcaagttgatatcatgaaaagataaacatttaatgtttacaatggattgcgtgacattctctggttaaatttatgtaataaaaattatgcggcaaataaattgccgcaacatattataccaacaggaacatacaaaaactcaacaacaaatatttccgagcataaatcaacccggagttacttattctgaagcaagaaatttgtcgagataaggtacaacataaggaacagaagtctggaatataccattttcaatccagtaaagggtgtttgcccctgggcgtaaattaaaggcggtgagatatgcatcagctgcttcccggttcatccccttcatttcataaaccttgccaagcaacacataatttagccaggacatttcaagatcaatgccagtatttatcgcctggtaagactcatctgttttaccttttaccagagcactgaccgcttttatttgatatataatggacaggttgttcaattccggcagtgtaacaatgttatctatttctgtgttcagtgctgctaattgtttttcatctaaaggatgttgagaatggcgcacgatatcaactaatgctttttctgctctcgcgtaggtaaattctggggatgattgaacaatctcacctaataattcactggcacggttcaatgatttatcatcgccatgcagtaaataatcatgtgcctgataaaaattagttaataacgcaccacgatgcggcaaaattttctggagcgtctcctgcattcgttgtggccacggttggtttaacgcttttgataaactctccagtaaatcattttgaatcgccagctgattaccgttagtgatgacataacgtttatccagcatggttgaaccatctgcattgtctaccaattttatcgacataaagcattgttgagcacggtattggcgctgattaacaaacgcaatagataatgttttaccggaactgctcggttcatcaatgttgtagttgattttgtcatgcaccataaaggtggagaaggtgttaagtgatgtcgccaccaaatcacccacgcctatcgcgtaagagagctgatacggggaactccagctgttacaacttttatttaccatattaatgtcaatatcgcgtggattgagcaaaatacgcgatttgctcataggaagacgtgtatcaagacttgaaaacgctaccagtgctacacagatacctaacgacaacaggaaaaaaaccatacccaaaaggtagtgaatcgtttgcttttaactggggattgttcaggtggcgttgcggtgttttgaatgttaagactgtgggagggagaatctgtggcaggaaccgcctctggtatagggggaggcgaagatagcattatttcctctccctcttcttcgctgtaccagataaccggcaccattaatttatagccgcgctttggtacagtagcgatatagacaggactatcttcatcattatcttttaatgacttacgtagttctgagatactctgcgtcacaacgtgattggtgacaatacttctcttccagacattatcgataagttcatccctgctaagtacttcgccactgtgttgagcaaagaaaaccagaagatcgattaatctcggctcaagggtaagttgacgcccattgcggctaatttggtttatggacggagtaacaagccattcgccaacgcgaactacaggttgttgcataatagaaactcattcgaaaagggaatgatgcaatgataattgccacaacctatttttaccatctatagatgggtttatttacatattattggtgaatgcaagacgttatttttaccagccataaacttcttgattacatagtattacgaaaggattttactgagaaccagaagtaatattccttaccatcaaaattcatcatctttgccaaagaaaaatgttcagaaaataatccatggaaaattgtccggagcacttactattttaatggattgttagtctttgcatgagcaagcgaactgatacatttctctttgttctcattcagaaaatctcatcagtcgccgttcagaccggtgttgtgctttatggatgcgttacgctcctgatgacgtcatttgacgttcaacagcatcacggggccgcacgacatttcacgtcagttagtgctatagctcaggaacaaattttcccgaattgggatatgcccgcaaattgctggtgatgtggggagaatctggttgagttcggtagaattgatttggaggcagaacgcttaaatcgtggcgtcctgaaacgaaaaacggacctccgtggaggtccgtttatatgaatttggtgcccggactcggaatcgaaccaaggacacggggattttcaatcccctgctctaccgactgagctatccgggcaacggggcgcattaaaccgtaatctgcacatctcgtcaacctaatttcagtaaaagcgattcaactgcttaagattgcggcaaatcgcttcttttctgtgtttctgtcaggtcaatgcaccaccctggcggcagcgggcgaagcgcaggatatcttccgccagccgatgtgcagtgtcgacatccgcctggctacgattcaccagcattcggcttaaacagccttccagcaccagttccatctgctttgctaccatcgccggatcgtcaacttccagtgtggttaacagttcgtgggtgaaatcgtaggccgcgcttttttgctgatcggccagttgatgaatagggtggccaggatcgggataaaacgtacaggcagcgataaatagacagcccggatagcggttgtttttaacgcactccgataacgcctgataacgtgccagcagcttttgttcggcggtttgcgtttcgtccagcatcagctgacgacgccagacatctatctgttggctaagataacgcagcgcatcgtagaggattgcctctttgtctggccagaagcggcgtagctcgtccagtggataatccacacgttcagcaaccatctccagcgtggtgttggcaatcccttgtaattctaataatttcagggcttctcccagtacatcttcacgttgcacgctattttcctccgtctttcccactgcaagtgtcgttcacggttggcgatcgcgcaaatgtgcgctgaaggtttcagcatccataaagcccgtgacgcgtgcttgtggatgctcctggccttgtccgtcaaaaaagagaattgtcggtaggccaaggacattaagatgctttaacagcgccacatcttgtgcgtcgttggccgtgacgttggcctgaagtaagaccgtgtctgctaacgctttttgcacctgcgggtcgctgaaggtgtatttctcaaactctttacaggcgacgcaccagtcggcataaagatctaacatcaccggtttgcctttggcttcaacgagcgcctgatttaactcatctaccgttttgatttgtgtaaagttgagatgcgtctgagtttgcgcggtatgcgtcgcaccaaatgcccaatcctgaagtgggcgcacgctaaccaatgccgctgccagcagaataatttgcacaatacgcatccagccgcgtttagcctgtaggctggtgataaaggcccagccaaagaatgcgacacccagcgccgaccacaagcgtaatccccatacatcaccaatcactcgctccagcaggaagaccggcagtgcgaggatcacaaaaccaaacgcggttttgacttgttccatccacgggccgcttttcggcagcaagcggttaccaaagacggtaattagcatcagcggcaggcccatgcccaacgcatagagataaagcgtgccgccgcccagccacatgttcccgctttgggcgatatacagcagaatcgcgctaagcggtgcggtggtgcatggtgaacagatcagtccggcaatcgcccccataacaaacacaccgccaggtgagccgccctgttggcgattgctcatcaacgtgagacgtgtttgcagcgaagaggggagttgcagggtaaacaagccaaacattgacatcgccagcaaggtaaagacgatggcgaggccaatgagcacgtatgggtgctgtagcgccgcctggaactgtaaccctgcggcggcaaccaccagacccagcgccgtgtaggtcagcgccatcccctgcacataaataaaggtcagcaacaatgctctggcagtggagagccgctgtttaccacccagcacgatgccagaaatcagtgggtacattggcagcacgcatggcgtaaaggcgataccaataccgatcaacaacgcccagagcgcggaaaagggcaattgcgcggtgggctgctcttgctgcggaacagacacaggctgtggcgctgcgttgttggcgaccacttcgcttaacggaacggttttggtttctggcggataacagaaaccggcatcagcacagccctggtaggtgacagttaacgtcgctcccgcactcgcctggttgatggtgacgggaagcgtcagccgatcgcggtaaatctcgcttttgccgtaaaactcatcttcatgccagacgccttgcggcagctgcacgtcggcaattttcgcgtgttccggcgtaatgcggatctgtttacggtagaggtagtaaccgtctttgatctgccaggtcagattaaggtcatgttggttttgctgaaaatcaaaagcaaaggcttgatccgcggggacaaattgtgaacgtcccggcgcgtcgaataatccggcaaaaacggaagtgctgcaaagtagcaggatcagcgtaaagatgcgttgagccatgagaggtaatctgtgtctccgtgtgtaacaggtaaaaccagaagttccggggtttgatatggatgatgagacttcaggcattccagcagtgcctgctggtgagatacggtagtttttaaaatcatctgcacttcgtattcttgctccagcttaccttcccagtaatagagagaggtagcgccggggatcaaggtcgcgcaggccgccagtttttccgccagcactttggcggctaaatcctgggctgtcgcttcatctggtgccgtacatagcaccacgacagacgcggtattcgaacttttttcatcaagcataaacacctcgcaagaacagatggaaccgcaagagagaggtcactatacaacggacgggggaaggatgttagtcggcgggaaagaaagcggggcgtgaacgccccgcgattgatcattacagcatgaagctacccagcacgaagccgaagcaaacggccagggcaacacccagagtacccgggatgaagaacggatggttgaagacgaatttaccgatacgggtagtacccgtgtcatccatctgtaccgcagcaaccagcgtcgggtaggtcggcagaatgaacagaccagacaccgcagcgaaagaagcaacagcggtcagcggtgaaacgttcagtgccagagccatcggcatcagtgcttttgcggttgcagcctgagagtacagcagagcagaagcaaagaagaagatgacggccagcagccacggatgaccctgaatcacttcaccagcggtatctttgatccagtcgatgttgttggaaacgaaagtatcgcccagccacgcaacacccaggatacaaatacaggcgctcatacctgctttgaaggtgctggagttgaggatgttgtcggtatcgactttacagataacggtggtcagagttgcaacgctgagcatgatgatcaggattgcgttggtggtgttcatcagcggtttttcaaccagacccatgcttgggctgttgatgattgcatagataaccacgccaactacgcccagcaggaacagccagacggacgtttttgcaccggatttgatttcaatctgcttttcaccgcgcagttcaaccaggccctcttccagacgcttgcgataaatcggatcgtcagagagtttggagttgaacagcatagtgaccaggaaggacatcaccagaaccgccagcagggtggacgggatgaccacggagagcagatggaggtagctgatgccatgaccttccatcacggaagacatgtaaaccactgccgctgagattggcgatgcggtgatcgcaatctgcgcggataccactgcagtagacagcggacggcaaggtttaacgccttgttccttcgcaacttcagcgataactggcagtgtcgccagagagatgttgccagtaccagcaaagatagtcaggaaataggtcacgatcggtgcgaggatcgtgatgtatttcgggttacggcgcagcagcttttctgtctgatgaaccagatagtccagaccgccagcaacctgcatggcagaaatagcggcgataaccgccatgataatggagatgacatcgaacgggatgttaccgggtttaacgccaatagcggcaagaaccagcacccccaatccgcctgcaaaaccaatacctattccccccaatctggcgcccaagaagatcgccagcaaaactatgatgagttctacaactagcatattagccttccttgttttttaacaagttgatattagattgttatttttaagttactgctcacaagaaaaaaggcacgtcatctgacgtgccttttttatttgtactaccctgtacgattactgttcgctttcatcagtatagcgttttgctttgtaagccgggtgcatcagattctgtacggagaaaatatcgtcaagttccgcttcagtcaacagaccgcgttccagaacgacttcacgtacactcttaccggtttcggcacagattttacccacgatgtcaccgttgtggtgaccgatgaacgggttcaggtaagtaacgataccgatagagttgtaaacgtaaccttcgcacacttctttgttagcagtgatgccgttaatgcatttttccagcaggttgtagcaagcgttggtcagaatgtgaacggattcgaacatggcctggccaatgaccggctccataacgttcaactgcagctgacctgcttctgctgccatggtaacagtggtgtcgttaccgatgactttgaagcatacctggttaaccacttccggaacaaccgggtttactttagctggcatgatggaagagcccgcctgcagttccggcaggttgatctcgttcaggccggcacgtgggcctgaagagagcaagcgcaggtcgttacagattttggacatcttcacagccaggcgtttcagcgcgccgtgaaccataacataagcgccgcagtcagaggtcgcttcgatcaggtcttcagccggtacgcatgggaagccagtaacttcagccagttttttcactgccagcggagagtactctttcggcgtgttcagaccagtaccgattgctgttgcaccaaggttaacttccagcagcagttcagcggtacgttggatgtttttcacttcttctttcagcaggatgctgaaagcgcggaattcctgaccgagggtcatcggtactgcgtcctgcagctgggtacgacccattttcaggatgtcctggaattcgacagctttacgttcaaagccttcacgcagttggttaatcgcatctaccagcttaatcagggaagagtaaactgcgatacggaaaccggtcgggtaggcgtcgttagtggactgacatttgttaacatggtcgttcgggttcaggtactgatattcacctttttggtgacccatcagttccagaccgatattggccagcacttcgttggtgttcatgtttacggaagtacctgcgccgccctggtagacgtctaccgggaactgatccatgcattttccgttgttcaggacttcatcacatgcggcaatgatggcattcgctacacttttaggaatggtttgcagctctttgtttgccatagctgcggcttttttaaccattaccataccgcgaacaaattcaggaatatcactgattttgttgttgctgatatagaagttttcaatcgctctcagagtgtgaacaccatagtaggcatcagctggaacttccctggtacccaacagatcttcttcgatacgaatgttgtttgacatgtgaaccttctttttcaagctgccaatgatttgctttaaacacacagaatatatgtggtttcgaatgtttttcgaccgacgattatcccctgcatcgaccgaatacccgagatcatatgctgcttgaggatttctaccgtaatctggatcactttaagtgtcggtttttaccccttaattattaatttgtgaaatagatcaccgctttgggattactaccaaaaatagttgcgcaaacatcttgaaattttgctaatgaccacaatataagctaaacgcgattcgcaacccattcaggtagccggggttaaccggctgctattacaggagaaacctttgcgctggttaccttttattgccattttcctttatgtctatattgagatttcaatctttattcaggttgcccatgtattgggggtattgctgaccctcgtgctggttatattcacgtcagttatcggtatgtcactggtacgtaaccagggctttaagaatttcgtgctgatgcagcaaaaaatggcggcgggtgaaaacccagcggcggagatgattaaaagtgtttcgctgatcattgctggtttgctgcttttattaccgggcttttttaccgacttcctcggtcttctacttttattgccgccggtgcaaaagcatctgacagtgaagttgatgccgcatttgcgcttttctcgcatgcctggcggcggttttagcgccgggaccggtggcggtaatacttttgatggtgagtaccagcgaaaggatgatgagcgcgaccgccttgatcataaagacgatcgccaggattaatgtcgaaacgccggattatgtggttatgccattttccggcgtttttcgttttggcagcaacagccataaccccgccagcatgatcagcgcatagagacttttccagccgaccattgccagtaacagaacgcataacagcccgccaaccaccgccagtagtcgataacgtccttgcaataatttacagcctgccagcatgcataacagataaatcataataaagatgccattggcataaataataagagcgtccagattgatctctaaagcatgaatcaccaaagtgctcaccacacagcagccgagcaccgcattgagggcattattcgggatatggcgagaagagaggcgtgccaggtagtggtcaggattatgttgcgcctgcgaccagaccaggcgggcgaagctctgtatataaatgttgagactggcaaagcaggccagatagccaatcacgcaggcaatccataacgctcctacaccgaacaactgcactacaatttttggaagcgatgctgccgccgccattttttcaccataggcgtcgaagtgtaagacgactaccgtacagccccagtagactaatcctgccagcagcagaccaatcatcaaagcacgaggaaaatcacgctctggatttttaaattccgaggcgagatgggcaaatgcctccagaccgacaaaacaccagaacatcactgataacgcagcaaataacccggtaagttcgatattaccaggtgccggaaaggggatattcgcaggtttgatatcgcccgcccaccagatagcgacaatcagcgcgacgataagtccggcaataacggtttgtagattagcactggaactggcaccgcgagtaccgatataccacaccagcgccagcgtaccgagttctgccaacaacagttgccagctatgccagccaaacatcgcctggccgaacccggcggcaatttgtagtgcggcaggcaaacccacgggaatgaccgataaaaacagccagccggtgactcgctcaagccgcgaaccaaacgccataccgacgaagtgcgcgacgccgcctgcgctgggatagtggcgacccagaatcgcaaacacaatcgcaatcgggaacactaagataatcaaaacgggccacgcccacaggctgttattgcccgctaccagcgcagctaacgcaggaacggcaaacacgccagtgcctaataatgacgtcgatagcaggccaatgccctgggccagccccagttcttgtttgagtccactcatgggttgatgtccgattgcgcccaaattttgggcaactgcgtagattttcgatggtagcacaatcagattcgcttatgacggcgatgaagaaattgcgatgaaatgtgaggtgaatcagggttttcacccgattttgtgctgatcagaattttttttctttttcccccttgaaggggcgaagcctcatccccatttctctggtcaccagccgggaaaccacgtaagctccggcgtcacccataacagatacggactttctcaaaggagagttatcaatgaatattcgtccattgcatgatcgcgtgatcgtcaagcgtaaagaagttgaaactaaatctgctggcggcatcgttctgaccggctctgcagcggctaaatccacccgcggcgaagtgctggctgtcggcaatggccgtatccttgaaaatggcgaagtgaagccgctggatgtgaaagttggcgacatcgttattttcaacgatggctacggtgtgaaatctgagaagatcgacaatgaagaagtgttgatcatgtccgaaagcgacattctggcaattgttgaagcgtaatccgcgcacgacactgaacatacgaatttaaggaataaagataatggcagctaaagacgtaaaattcggtaacgacgctcgtgtgaaaatgctgcgcggcgtaaacgtactggcagatgcagtgaaagttaccctcggtccaaaaggccgtaacgtagttctggataaatctttcggtgcaccgaccatcaccaaagatggtgtttccgttgctcgtgaaatcgaactggaagacaagttcgaaaatatgggtgcgcagatggtgaaagaagttgcctctaaagcaaacgacgctgcaggcgacggtaccaccactgcaaccgtactggctcaggctatcatcactgaaggtctgaaagctgttgctgcgggcatgaacccgatggacctgaaacgtggtatcgacaaagcggttaccgctgcagttgaagaactgaaagcgctgtccgtaccatgctctgactctaaagcgattgctcaggttggtaccatctccgctaactccgacgaaaccgtaggtaaactgatcgctgaagcgatggacaaagtcggtaaagaaggcgttatcaccgttgaagacggtaccggtctgcaggacgaactggacgtggttgaaggtatgcagttcgaccgtggctacctgtctccttacttcatcaacaagccggaaactggcgcagtagaactggaaagcccgttcatcctgctggctgacaagaaaatctccaacatccgcgaaatgctgccggttctggaagctgttgccaaagcaggcaaaccgctgctgatcatcgctgaagatgtagaaggcgaagcgctggcaactctggttgttaacaccatgcgtggcatcgtgaaagtcgctgcggttaaagcaccgggcttcggcgatcgtcgtaaagctatgctgcaggatatcgcaaccctgactggcggtaccgtgatctctgaagagatcggtatggagctggaaaaagcaaccctggaagacctgggtcaggctaaacgtgttgtgatcaacaaagacaccaccactatcatcgatggcgtgggtgaagaagctgcaatccagggccgtgttgctcagatccgtcagcagattgaagaagcaacttctgactacgaccgtgaaaaactgcaggaacgcgtagcgaaactggcaggcggcgttgcagttatcaaagtgggtgctgctaccgaagttgaaatgaaagagaaaaaagcacgcgttgaagatgccctgcacgcgacccgtgctgcggtagaagaaggcgtggttgctggtggtggtgttgcgctgatccgcgtagcgtctaaactggctgacctgcgtggtcagaacgaagaccagaacgtgggtatcaaagttgcactgcgtgcaatggaagctccgctgcgtcagatcgtattgaactgcggcgaagaaccgtctgttgttgctaacaccgttaaaggcggcgacggcaactacggttacaacgcagcaaccgaagaatacggcaacatgatcgacatgggtatcctggatccaaccaaagtaactcgttctgctctgcagtacgcagcttctgtggctggcctgatgatcaccaccgaatgcatggttaccgacctgccgaaaaacgatgcagctgacttaggcgctgctggcggtatgggcggcatgggtggcatgggcggcatgatgtaattgccctgcacctcgcagaaataaacaaacccccgggcagaaatgtctgggggtttttcttttggtcatctttctagtataagattcagacacggacgacgcgagtggcgtccagctcattgattatggggaataacatgcacgtaaaatacttagcagggattgtcggtgccgcgctactgatggcgggttgtagctccagcaacgaattgagtgctgccggtcagagtgtacgcattgtggacgagcagccaggcgcagagtgccagctgattggtactgcgacaggtaagcaaagcaactggctttccgggcaacacggagaagaaggcggttctatgcgcggcgcagcaaacgatctgcgcaaccaggcggctgcaatgggcggtaacgtgatttatggcatcagtagcccgtcgcagggaatgttgtccagttttgtcccgacggatagccagattatcggtcaggtttataagtgcccgaactgatgtgatccagaggctgggtgacaaacgtataattgcctgatgcgcttcgcttatcaggcctacataaggcattgcaactgattgaatgcttgagaatttgtaggccggataaggcgtttacgccgcatccggcatgaccaacgatcacgttatcagtcatttcaggctggatggctccagcctcgcattagcaaagatgagattatttcgcctgtggtgcagttttgctggtggattgaacacgtaagtgatgcagcgcgcgtaagcattgatcctgggttagcggttgggcgttattcgccgctacggtgcgaacatagacctgacatggcacacccgcgagttttttcagtcgtgggctgaaatcaagcattcggcgagtgatcgcttctatttctttacccggcgttgcttcacgcgttttcaccactgcgccgctaaattgttctttgccactttcatctttaaagcggtaaagcaccgccagataatggtcgaacaagttatgtttccattccggttgggaataggtgtcatattccagattgccattgtcctggcagtcaacgtcgtataacggcaggaaatctaacagtgaggtaatacgtaatgccagttcacgcatttccgcattattaattgcatgaatgattgctcgcgccagcatttcaatctgcaactcattgacgactaactcacatttgctaccgtcatgtagcgttaatacgaaggtaagattttcgccttgattatcggtaagttccagcgtgttaacccgacgattaatatcggcatttttaagctcatcaaccagaatttctgggatgttttctgccattttcttaatgactttatcgcgagcttgctcatactgaaggtgtgcagcagcatccagtttatgcttttgatgcagacgactttccagcgcaatcagcaggtcgcgcagttccatgacagacataaagaacaacgattctttattgcgaggttctttaattttcagcgccagtgcaatgaaattattactcttgcgaataacaccggtattaacacccttgatgcttatggccatgtaggttctccctaaccatttctcaattaaataattaattttaatttataagccagataaatgggcttggtagtaatagttgttaaaataacataaatagccgtactcactctatataaacagaaaagaaaggttaattattggtgttagctatataaaaagtaacaacagcaatgcatatgaataattaaaggttatgcaacgggcaaagattaaacttcccagtttaatgacaggttgctgtacttgcgtttgttgctcttgccggatgcagcgtaaacgccttatccggcctacagttcattgcaaatccattcaatttcaatgcacgatgtaggcctgataagcgtagcgaatcaggcaattttaatgtttaacttccctgtttaatcagttactgctggcgtagctggagatccagcggcgttttgctgggttcgccgccaatttctcgcgccagtttcggcaccagatatcccgacaccagtgtcagcaactcacgcataatctgccgtgcttcgtcatcactcaccataaaatgcgccgcgccctgtactttatcgagcacatgcaggtaatacggcattacgccggcatcgaacaacgcattactcaggtttgccagcgtttgtgcgttatcgttcacatcacgtaacagaacgctctggttcagcaaagtaacgcctacccggcgcaacttagccatcgcctgacggaatgtttcatctacctcattggcatggttgatgtgattcaccagcaagatttgcagcgtagaacgggcaaagcattcaaccagcgcctcggtgatacgtgccgggatcacaatcggcagacggctgtgaatccgcagacgttttatatgcgggatggcttccagttgtgtgagcaaccagtccagctcgtgatctttcgccatcagcggatcgccgccggagaaaatcatctcgtccagttccggatgcgcagcaacatactcaagtgcagtttgccagttacgcttgttgccctgattttcggcataggggaagtgacgacggaagcaatagcggcaatttaccgcgcagccgcctttgaccagcaaaagcgcccggttgtggtatttatgcaacaaaccaggcactacgctgtgctgttcttccagtgggtcggtggagaatccgggcgcgatgacaaactcatcttgcgaggtaagtacctgacgcaaaagaggatcgtccggattgcctttctccatgcgatcgataaatgagcggggcacacgcagggcaaaaagctttttggcgctgcgtccggctaacagtttttcctccgcgtctatattcaaaagacgcagaagttcatcaggatcggtcacaacatcggcaagttgcgttaaccaatcttctctggatggggtatttagggttacaatatgcgccattttgtggcttagctaccaattaacaaatttcagagggccttatggcaacgtactatagcaacgattttcgtgctggtcttaaaatcatgttagacggcgaaccttacgcggttgaagcgagtgaattcgtaaaaccgggtaaaggccaggcatttgctcgcgttaaactgcgtcgtctgctgaccggtactcgcgtagaaaaaaccttcaaatctactgattccgctgaaggcgctgatgttgtcgatatgaacctgacttacctgtacaacgacggtgagttctggcacttcatgaacaacgaaactttcgagcagctgtctgctgatgcaaaagcaattggtgacaacgctaaatggctgctggatcaggcagagtgtatcgtaactctgtggaatggtcagccgatctccgttactccgccgaacttcgttgaactggaaatcgttgataccgatccgggcctgaaaggtgataccgcaggtactggtggcaaaccggctaccctgtctactggcgctgtggttaaagttccgctgtttgtacaaatcggcgaagtcatcaaagtggatacccgctctggtgaatacgtctctcgcgtgaagtaatgcggttgtggtgcggcctgcaggctgcaccatcacttattcaggtcagagatgatgaaacgccttatcgttcttgttttgcttgccagcacgctgctcacgggctgtaacaccgctcgcggtttcggcgaagacatcaaacatctcggcaactccatctctcgcgctgccagctaatttttcttctcttccgaaaaatcatcagattcccatcatttttggcgatgttgtctattattaatttgctataggcaaacataaataacattacctaaaaggaagacgttatggtgaagaagacaattgcagcgatcttttctgttctggtgctttcaacagtattaactgcctgcaacaccacgcgtggcgttggtgaagacatttctgatggcggtaacgcgatttctggcgcagcaacgaaagcgcagcaataagcaataacggtacgacagctgtgtcgtgccgtttgttttttctgcgatagtcacaaaggtaatagttgaaattcccctgccacctggcaaaatatccgttcaaccatcagctttgcaggacgacctgcaaacgcctcttttcaccggggacggccccaattctccggagcctgatatgtcctggattatcttagttattgctggtctgctggaagtggtatgggccgttggcctgaaatatacccacggctttagtcgtttgacgccgagtgttattactgtgacggcgatgattgtcagtatggcgctacttgcctgggcgatgaaatcgttaccagtagggacggcttatgccgtgtggacgggtattggcgcagtcggcgcggccataaccggcattgtgctgctcggtgagtccgctaacccgatgcgcctggcgagtctggcgttaatcgtattggggattattggtctgaaactcagcactcactaactaccaggctgctgtacccaaataaatttactgacatcaaacccttcccgggtcgcgactgccagcatctcctgtttcacttcgtcagaaatggttggcgtgcgggagagtatccacaggtagtcgcggtccgggccgcaaaccagcgcatggcggtattcccgatcgagtgcaataacgttataaccgccatagaaaggaccaaagaatgacactttcagcgcagcgcgagttggtgcgccggtaaagtacgctttcccttcactctgctgccacattcctctgtcagggttatagcctttattaatgacattcaggccgccgtcatcacgcaggctgtatgttgcggtgactttttccagtccacgttcaaagcggtgatcaaaacgggcaatctcataccaggtaccgagataacgtttggcgtcgaaattatttactacggtcacgccacgcggcggcgtaggagaactgcaggcaacgaccagaaatgcagctgtcgctgcggcaacgagagggagcaggcgcataaatgtttccttactggtttttttctaagtgtagatgacagcaaggaaaagcggagaaaaggtccgaaaattcggacccgatggaattttactgtagagcgttaagaatctgccaggcggcgtcgactctcgctggattgggatagtttttgtttgccagcatcacgatacccagctctttttctggaataaacgcgacatagctaccaaatccgccggtcgcccctgttttatgtacccatgatgcgcgtactgcaggagttgggggcgtaatcgcttttacggggcgtgctgccagtgcaattttattgtcactgccgttaatgatgctgtcaggatttaccggccagtccagcatttcccagcccaggccctgatacatatcgccggtttgccagtagcgagattgtgccagttgtatcccttgttgaagcgttttctcattgatatcaaggggttttaaattgctttgcacccagcgggccatatcttcaatggtcgacttcacaccataagcttcagcatctaacgccccaggcgaaacatgcactgccttaccttcgcgatatccccaggcgtaattcttttcttctgcgggcggtacattaatccacgtatggttgagtttgagtggctggaagacacgagtttgcatcgcctgctcaaaactcaaaccagacggcttcacagccagtgcgccgaacaaaccgatactggagttggcatacagacgttgtgttcctggagcccatgcaggctgccagttttgatagaagcgcagcaagtcgcttgaggatttcacctcatccggcacctgcaatggcaggccgccagcagtgtaggttgcgagatgtaatagtgtgatcccattccactgtttagcggtaagttcaggccagtattttgttgtgggatcgcttaacttgatttcccctcgagcaatagcgtcgccaccaagcacgccagtaaatgttttgctgaccgaacctaactcaaacaacgtttgctgtgtgacgggctgctttttggcgatgtccgcatagccccaggtaaagtaataaggtttaccctgataaattaccgccaccgccatacccgggatcttttgttgctctataagcggggtaattgtgcgatgcacaatatcgttgatttgttgaggggcagcaaatgtggagcaagaggcggtaattaataaggcgcagagcgtcgttttgaacatagggtctggtttccatacaaaacggcccgccataggcgggccggatttacattggcgatgcgttagattgtaacgacaccaatcagcgtgacaactgtcaggatagcagccagaccgtagaaaacccatttgcccgcaggtacgtggattttcagatcgtgcatcgcgtggtgcatacggtgtaaaccacaccacagcggcagaacgatcatcaggaacaggaatacgcgaccaatgaagctctgcgcgaacgccagaacgcgctcgtagctcagcgcatcacccggaaacaaccccagtggcagcagaatacccaccagcaggatcatcaccggcgcaatgatggcgctccacataccaccggccccgaagaggccccagaataccggttcgtcagaacgctttggatttggattaatcatctcaggctccttaccagtacagggcaacaaacaggattacgatggtggcaaccacagttaccgcccagagacttttgataattggctctggtcccattttttcgtcttttacaatgatattggccgctttcggtgccagttcaaaccaggttttggtgtgcagcagagctgccgccagagtgatcaggttaatgatcacgataaccgggttttgtaaaaagtcgacgaatcccgcccaggcttccgggccatttttcagggcaaacagcccgaaaatcagttcaatgctgaaccacacagccggaaccgccgtgccttcgcgcagcatgtaaaagcgataaaacggcaattttttccaccaggtggacgtcattggccgtacatacggtttacgtttagtcgtcatgttgcactccttagcgtggtttcagggtcgcgataagaaagtctttcgaactttctactttgccctgctgaatggccgcagccggatcgacgtgtttcgggcagacttcggagcagtagcccacgaaagtacagctccatacgccgttctggctgttcaactgcgccatacgctccttcttaccgtggtcgcggctatcttcgttataacgatgcgccagcgtaatggcagccggaccgatgaactctgggttcaggccaaactgcgggcacgcggcgtagcacaaaccacagttgatgcaaccggagaactggtgatacttcgccatctgcgccggggtctggatgttagtaccctgatccgcggtgcgggagttgccgatgatgtacggtttgatcgcttccagactttcgatgaagtgggtcatatcgaccaccagatcgcgttcaatcgggaagttagctaacgcttcaaccttcataccgtcggtgtaatcacgcaggaaggttttacatgccagttttggcacgttgttaaccatcatgccgcaggaaccacaaatcgccatacggcaggaccagcggtagctcaggtccggtgccaggttgtctttgatgtagcccagcgcatccagtaatgaggtagttgcgtcataaggcacttcatagaatgcgctatgcggtgcggtatcgacttccgggttatagcgcaccacctcaattttcaggtttttcatctcagccattcgccttctccttcttattggctgcttccgccttatcggctgcatccgcttcgccaccgtaaacgcgtttagctggcggcagcgtagtaatcttcacgtcgctgtactccaggcgagtcgtgccatcagcatcgcggaaggcgagggtgtgtttgaggaagttgacgtcgtcacgctcggtgcaaccttcgtccagacgctggtgcgcgccgcgggactctttacgtgccattgcggagtgcgccatacattcagcaacgttcagaccgtggcccagttcaatggtgtagagcaggtcggtgttgaacacgctggaagtgtcggtgatgcgcacgcgcttgaagcgttcctgcagctctgccagcttgtcgatggttttctgcatcagttccggcgtacggtagataccgcagccttcttccatagccaggcccatttcgtcgcggatcttcgcccagttttcgccgccatcctggttaaccagatctttcagacgttgttcaacgccagctgcctgcgcttcaattgccgcttcgttgccattaccggcagttgctgcacgctctgtcgcttgttcaccggccagacggccgaagaccaccagttccgccagggagttagaacccagacggtttgcaccgtgcagaccaacagaggaacattcacccacggcgaacagacctttaatgcgggtttcacagttctgatcggtttcgataccgcccatggtgtagtgtgcggtcggacgtaccggaatcggttctttaaccggatcgacgccaacgtacgctttcgccagttcgcagatgaacggcagacgttcatgcagttttttctcgccgaggtgacgcaagtcgagataaaccacatcgccacgcggcgtggagatggtgttgcctttacgccattcgtgccagaaggcctgagagactttgtcgcgtggacccagttccatatatttgtttttcggctcgcccagcggagtttccgggcccatgccgtaatcttgcagataacggtagccatttttgttgaccagaataccgccttcaccgcggcaaccttcggtcatcaggataccggaacctggcagaccggttgggtgatactgaacgaattccatgtcacgcagcggaacgccgtggcttagcgccatacccataccgtcaccggtaacgatgccgccgttggtgttgtaacgataaacgcgacccgcaccgccagtagccataacgaccgcgttagcacggatctgcaccagcgtgccttccatcatgttcattgctaccaggccgcgaacatgaccatcatcaaccagaatatccagcacgaaatgttcgtcaaaacgctggatctgcgggaattgcagagaggtctggaacagcgtgtgcagcatatggaagccggtcttatcggcggcgaaccaggtgcgctcgattttcatgccgccgaagcgacgtacgttgacgctaccatccgggcgacggctccatgggcatccccacagttccagttgggtcatttcggttgggcagtggtggacgaaataatccacgacatcctgctcacacaaccagtcgccacccgctactgtatcgtgaaagtgatattcgaagctgtcatgatcctgcgcgacagcggcggagcccccttctgcagcaacggtatggctacgcatcgggtatacttttgagattagtgcgatttttgcattcggatttgcctgcgcggcagcaattgcagcacgtaatcccgcgccaccggcgcctacaatggcaagatcggcttgaaaggtttgcacgacattcctccagattgtttttatcccacagccacgtacttcagggtaagtacctgaaagttacggtctgcgaacgctattccactgctcctttataggtacaacagtatagtctgatggataagtctgaaatttgacgagatcgatttttttagtgcgcaagagggctaaattatcactgaagatgattaatttaattactaaaccatcagatcgtgctttttttagtcactgcccaccgctgtttgattcctgcgtaaaatttgtctcgccgtcgcgttgcgagtagacttcgtgcccttgtcaaaaactggagatttaactatgagcgaaacggcatcctggcagccgagcgcatccattcctaacttattaaaacgcgcggcgattatggcggagatccgtcgtttctttgccgatcgtggagtgctggaggtggagacgccttgtatgagccaggcgacggtaaccgatattcatttggtcccgtttgagacacgtttcgttggccccgggcattcgcaggggatgaatctctggttaatgaccagcccggaataccatatgaaacgcctgctggttgccggttgtgggccggtattccagctgtgccgcagcttccgtaatgaagagatggggcgttatcacaaccctgagttcactatgctggagtggtatcgaccgcactatgatatgtaccggttgatgaacgaggtggacgatctcttacaacaggtgctggactgcccggcagcagaaagcctttcttatcaacaagctttcttgcgttatctggaaattgacccgctctctgccgacaaaacgcaactgcgggaagtcgcagcgaaactggatttgagcaatgttgctgataccgaagaagaccgcgacacgctgctacaattgctgtttacctttggcgtagagccaaatattggcaaagaaaaaccgacctttgtgtaccactttccagccagccaggcatcactggcgcaaatcagtaccgaagatcatcgggtcgctgaacgctttgaggtttattataaaggtattgagctggcgaatggtttccatgaattgacggatgcccgtgagcagcaacaacgctttgaacaagataaccgtaagcgcgcggcgcgcggtttgccgcagcaccccattgaccagaatctgattgaagccttgaaagtcggtatgcctgactgttccggcgtggcattaggtgttgatcgtctggtgatgttggcgctgggcgcggagacactggctgaagtcatcgcctttagcgttgaccgggcataattctgaaaaattactgaattaacagcgaagaatggcgtgataagcgccattctgtagcatatgttttcatttttccgttaaaggccacaatttaagactggatatttgatatcatccaggtatcaattctgtattggtttttacgctgcctgctcaatgttgcgcagtgcagttcagtgggcacgtgttatacacgcgctgaaatgaaggatggtttcatgcctcacacgataaaaaagatgagtctgataggactcatattgatgatctttacttccgtatttggatttgccaatagcccatcggcttattacttaatgggttatagtgcgattcccttttatatattttctgcattgttattctttattccattcgccttaatgatggctgaaatgggagctgcttatcgcaaagaagaaggcggtatctattcctggatgaataatagtgtcggaccacgttttgccttcattggtacgtttatgtggttttcctcttatatcatctggatggtgagtacctccgcgaaagtttgggtaccgttctcaacattcctctatggtagcgacatgacccagcactggcgtattgccggactggagcctacgcaggtggttggtctgctggctgtggcatggatgattctggtcaccgtcgttgcttctaaggggattaataaaattgcccgcattactgcggtgggcggtattgcagtaatgtgtctgaatttagtattgctgttagtaagcattactattttgttattaaatggtgggcatttcgcgcaggatattaatttccttgcatcaccgaatccgggttatcagtccggtctggcaatgctatcgtttgtggtatttgccatttttgcctatggcggaattgaagcggttggtggtctggtcgataaaacggaaaatccagaaaagaactttgccaaaggtattgtttttgccgctattgttatttcaatcggttattcgctggcaatatttttatggggcgtcagcacaaactggcagcaggtattaagtaatggttccgttaacctcggcaatattacctatgtgctgatgaagagccttgggatgacgctgggtaatgcactgcatttgtcacctgaagcgtcattgtcgctgggcgtatggtttgcgcgtattactggactttcgatgttcctcgcctataccggtgcgttctttacgctttgctattcaccgttgaaagccatcatccaggggacgccgaaagcattgtggccggaaccgatgacgcgcctgaatgcgatggggatgccgtctatcgccatgtggatgcagtgcgggttggttactgtcttcatcctgctggtttcgtttggtggcggtaccgcatcggcgttctttaacaagctgacgctgatggcgaacgtgtctatgacgcttccttacctgttcctcgcgctggctttcccgttctttaaagcacgtcaggatctcgacagaccgtttgtgattttcaaaacgcatttgtcggcaatgattgcgacagtggttgtcgtactggtggtgacatttgcgaacgtcttcaccatcattcaacctgtggttgaagccggagactgggacagcacattgtggatgattggcggccctgtcttcttctcgctgttagcgatggcgatttaccagaactattgcagcagagtggcaaaaaatccgcagtgggcggtggaataacccgatgccctatcgtctacctgacgatagggcgtaaagacaggaaatgttatggatgacaccagccgggacccggcaataaccgaagatgaaatcagggcgctgcaattttctgccggggatgtagcggaaatagagcagacgattctctcttttgtcgatgcctgccacacccgtaaagtggcgatggtggtgggtagcaccattaacaccctcaaagatcgcgatggtaaacggtggggaaacctgccggatatttattgcgcttatcttatccgatgtctggtttttcgcggggaattagtgggatacggcgatttgtttcgtatgcgctatagcgaaattaagcgaccggttaccttatgagtgcgcgcatgtttgtcttatgctgcatctggtttattgtggcgttcctctggataaccatcacttccgcgctggacaaagagtggatgattgatggacgcgggattaacaacgtctgcgatgtgttgatgtatctcgaagaagacgatacccgtgatgttggtgtgataatgacgttaccgctctttttcccttttctctggttcgctttgtggcgaaaaaaacgcggctggtttatgtacgccaccgcgctggctattttcggctactggctgtggcagttttttctgcgctatcagttttgtttgtgagccggattggttcatccggcacacaaacttacaaacttcccgcctgacgacctttgcccgcagacgtcagcgttctccccgtttgtttaccgttgaggctttccagacgcatctggaagggcgggaatggcatatcgataccgtgggcatggaagccagccagaatcagctggtggatctcatggcgtagcggcatacggtgacccatctcagcggcgtaaatacgcagctcgaaaatctgaatcccctgttgcagatccaccaggaagacttccggtgccgggttgtcgatcaccagcgagcagcgacgcgctgcggtgagcaggatttccgtcacttcttcgctattggcatcggcaggggccggtatcgtcaacaccacgcgcgtgaccgagtcagagagcgaccagttgataaactgctcggtaataaacgccttgttcggcacgattatctctttacggtcccagtcgctgatggtggtggcgcgggtgttaattttcgtcacgctaccggtgagatcgcgaattgtcaccgtatcgccaatgcgaatcggtttttcgaacaggataatcagaccagagataaagttggcgaaaatttcctgcaaaccaaaaccgagaccaacaccgagcgcggcaaccagccactgcaatttcgaccactcaataccaatcattgagaagccgaccagcccgccaatcagcatcagcagatatttggtgatggtggtgatggcgtaacccgtacccggcgttaaatccaggtgctgcaaaatcgccagttccagcagcgcgggcaagttgcgcaccagctgcgtggtgatgataaacaccagaatggcaatcagcaccgcaccgagggtaattggctccagactttctacgccctgtaccgtggaggtgacatcccacagcgaaatattttcgaggaagccgaaagcggaatggatttctgaccacagcacaatgacagaaagcagggcgatcaacatcaaaattgagcgcaccagccgcaaggattgcgcactgatggcatcgagatcgacttcgctttcatcgacttcaattgctccttccgggctactgtgatgatgcgcttcctcttcgccacgcgcacgttgcgctaacatctctgcccggcgatgcttcgcccgatcaaacgccagcctgcggcgctggatcagcatccagcggcggataacgtgataaaccaccagtagcaggaaccagatggcaaccgaggtttcaagcctcgctaacagcgcctgtgccgttgccagataacccaccgccgacgccagaatggcaaccaacggcgcgccaatcatcatgttccacagcatatggttggtaatgttgtcgccgctgccctctttgttgagatacagcggaatcccggcctttttcaggctgagggtgaccaccgccagcgcaccgcaaatgaggataaagcaaagccgtcccagcgaaccggagaattcacggtcgtcgaggttatcgaacatcatcagcgccataatcagcggcacaataagcccgatgctcatcaggtagtagcgcatcccacgggaaacacgttcgcgcggccagccaaaatgagcgataaacaagccgttcgggcgggcaaaggtggcgcaaatcatcactacccacagcagcggcacggtggccgttacaccatcgccaatcgcgaccgccagcggataaggccacgcctcgcgcaagccgtaacccagcgtcatccacagcaccggtaacggtgacgcgacgagaatcgaccagaaaagagtgcgcaacgtcagccagaagtgatcctgagtcactttgccaactttcgccgccgaacgttcaagaaaacgggtgaaatagcggcgcgagtaaatactgcaaccgaccagaatcaacgcgccaaacagcggcaaaattgtctctttgctggtcagcatcatcacactggctttgcccaactgactgaaggtgtccagcgaaatgagacgacgcagatcctgggcgatttccagcggccaggcgatggtcatcgggcgcacgtcagaggtccagaacagatagcggtgcgttgcttcgttcacctctttcagcgcatcctccagttgcccgttggagactttcagcttggtcagttccaatagtagcgtgtcgccaccctgcaacaatgagttcagcaactcacgctgagtgcgcagttgtgcttccagaatacggttttgctcggcagtcagcggctgaccgtcggcctgatgaatttgccgtagcagcggctgtttattaagcagatcctcataacgtaaccgttgcacacgcaactgcgccatttcggtatcaagctgttgtggtttcggcatttccggcagccgtgccacctgcgcccgcagcgcttcgccgagcagattggacgatcccagccattgcgactgttcacgcagcgtattcaacgcctgccggacctgtaacgtctggctggcagcctgacgctgttgcgaggcaacgagatccatccgctgcgcctgttgattcaaagccgccgatagttcgcggttaattttgaattgcgcgacgatatctttcggcaaatcggcgctgttttctgccagcaattcggtactttccagcgcccgctccgcctcaagctgacgttggctgtttaattgattacgcaaggcctgcaaatacgcatccagttgctggctctctttttccgccagctctgagcgtaagcgcgctaattcctggcggttattggcagacagctgcgccagctccagttcatcaacgagcgccttaagacgtgcagagtcagactgcaacgcgaaattttgtgcctgattgagcggagtattgccggtaagcgttcccaggcggcgctcgatctcatttaactgacggcgggcgtcggtttgctgttgcggcagttgattcagcgaatcggcaatctcgcgggcgcgctcctgctcttgctgggcctgacggcttttatccagcaactggctgctgacctggagaatttcctgattcagcgcgtcggtagacattcccggcgacacgctgcgcggctcgtcacgcatgttgtttaattgtgcgcgcagagtagcggagagtttcggataattatcgataacttgctgatattgtttgatgcgctcaagggaaccttttcgttcctcaagcgcatttaaggcagactggagcgcctctacgacttccggctgtgcgggtttcgccgcttttgcctgctccagttcctgagtgatttgtttgctatcgggggccgtcgcggcgtacgccccccaactgaggcaccaggccatcagaaaagtgataatcaggcgcacgtcagcgtttcctttgatggattagacctggtcttttttgtcgtcaaccaatgggctggcgtcgtgttctgcttcgatctcttcagcaggaagcggggcaggttcagcgtctggcgtaacaaaggtttcggtagatactgccagcggctggccaattttcgtgacagacaggctttccagttgctcaaccagattcactttacccggtgcaaacaggttgataacggtggaaccgagtttaaagcgacccatttcctggcctttcagcagtgccacagaaccgtcgttttccccggcaggccaggtccagcgcttgatgataccttcgcgcggcggcgtaatggtgcccgcccagaccgtctcaatgctgccaacaatcgtcgctccgaccagaatctgcgccattgggccaaattcggtatcgaaaaggcaaatcacgcgttcgttacgggcaaacagattcggcacgttctgagccgtgagatggttaacggagaagagatcgcccggcacgtagatcatctcacgcagaataccgttgcacggcatgtgtacgcggtggtagtcacgcggggagaggtaagtggtcacaaacgtaccgttgcggaacaggtccgccatcagatagttgcctgccagcagggcttcgaggctgtagttgtggcctttggcttgcaggattttatcttcttcgattttacccaactggctgataacgccatcggcaggcatgaccagtacattcggatcggtatcgattgggcgtacttcgtcacgcagcggacggacaaagaattcgttaaaggtgcggtagctggcggtgtccggcttttgcgcctctttcatgtcgaccttgtagtatttaacgaacagatcgataaccagttttgtcagccatcctgcccgcttgcttgcgccccaacccgccaggcgagtaagccatagtttcggcagaatgtactgtagcgaaagtttaaatgaatttaacaaggtagcctccaggccattgttttgtcgttcctgatccggcctacatgccggatcctgaaaaaaaggggacgattctaacgacggttagcttaattgtcagtcatccgtatcagaaaagtttttacgcgtttttacctgcgccatgctttccagaatacggtgatagttttcgaaacgggtttccgcgattttcccttcctcaaccgcttcccggatagcgcagcccggatcggtatcgtgtttgcaatcgcgatatttacacagacctaaatagtcatggaattcgacaaagccctgagtgatttgttccggctccaggtgccagaggccgaactcacgcactcctggggagtcaatcacatcaccgccgtgcgggaagtgatacagccgagcggcggtcgtggtgtgctgaccgagccccgagttgtcagagatatcgttggtcaggatctctttttgcagccccagcaacgcattcagcaggctggatttgccgacgccagactgcccggcaaaaatgctgatgcgcccggtcaacgcctcttccagcggttttagcccatcctgagtatggctggaaaccatcaatacgcgataaccgatattgcggtagatatccatctgctcgttgacgaacgccatgccttcgtcgtccagcaggtctatcttgttgagcacaataatcggctcaatctgcaaggtttcgcaggccaccaggtaacggtcgataatattgagcgacagctccggcaaaatggcggagacaatgacaatctggtcgatgttggcggcaataggttttacgccgtcgtagaaatccggacgcgtcaacaccgaggtacgctcatgcaccgcttccacgatccctttgacatttacgccttccgccgccggtttacccggacgccagactacgcggtcgccggttaccagcgaacggatggtacggcgaatattgcagcggtgaacgtcgccatcggcggattccacatcagcgtgcataccaaagcggctgatgacgataccttcatcaggctcgccaaacagattgtcgtcgtagtcgggcttctccttagacgttttaagacgacgctggtgattggcgttcacgcggcgctgctggcctttggagagtttatttttactcaatcgtacagactcctggtcgcccctgatgggcaaaacatctatgatacacgcaattgtggatcaatatagtcactgtgaatgggtggaaaatagcatgagtgccaatgaaaacaacctgatttggatcgatcttgagatgaccggtctggatcccgagcgcgatcgcattattgagattgccacgctggtgaccgatgccaacctgaatattctggcagaagggccgaccattgcagtacaccagtctgatgaacagctggcgctgatggatgactggaacgtgcgcacccataccgccagcgggctggtagagcgcgtgaaagcgagcacgatgggcgatcgggaagctgaactggcaacgctcgaatttttaaaacagtgggtgcctgcgggaaaatcgccgatttgcggtaacagcatcggtcaggaccgtcgtttcctgtttaaatacatgccggagctggaagcctacttccactaccgttatctcgatgtcagcaccctgaaagagctggcgcgccgctggaagccggaaattctggatggttttaccaagcaggggacgcatcaggcgatggatgatatccgtgaatcggtggcggagctggcttactaccgcgagcattttatcaagctgtaaaatttttcctggtcacgtaagcgccggaatccacttgcggcggcgtgattttgacgctaaattgaacgtcttgctgataatttcagcacttgagataaaaacgcaaaaaaaacttttttggggggttgcagagggaaagatttctcgtataatgcgcctcccgtaacgacgcagaaatgcgaaaattacgaaagcaaaattaagtagtacgcgggaatagctcagttggtagagcacgaccttgccaaggtcggggtcgcgagttcgagtctcgtttcccgctccaaaatttgaaaagtgctgcaaagcacagaccacccaagcgggaatagctcagttggtagagcacgaccttgccaaggtcggggtcgcgagttcgagtctcgtttcccgctccaaaatttgaaagtgctgtaaggcacagaccacccaagcgggaatagctcagttggtagagcacgaccttgccaaggtcggggtcgcgagttcgagtctcgtttcccgctccaaattcttctctcaataaaatatccacagcgacgcgatgcgttattgctggtttttgttgtctctgacaaactcttgtaaacagagttatccacagcctcaggctgtaatcttaatttcaaagaaacttcgcacggtgaatagtatttttttaacctattgatagataagttaaaaattaagattccgttttgtcgagtcgatcacttgacgattttattcgtcttgaattgcaatgcgtttttatttttattcacaagctgtggatgaatcaggcgtcacgcggtaaccctttttcaatcacccgaaccagacgctgttttttcggcaattgcacttcgactatgcacgcatttcgtctctctatttgctgcgcaatcgcccacgctatgtgctcatcgagaagtgggtgctcacctttacgactttccagcgctgtcaaaatcgtttcatcccaaggggcattgcctaatgctacggcgatattacgcagccaacgcaggtgaccaatacgacgaatcgccgatccttccgtgacttttaaaaacttctcttcgctccaggcgaataactcaatgagttccggtgcgtgtagcggcttacgcgggctgaaatcctcttctgtggtgagttgtgaatagcgattccacgggcagataagctggcagtcatcgcaaccgtaaatacggtttcccattaacggtcgcaactcttccgggatcgccccttcaagttcgatggtgagataagagatacagcggcgagcatcgacggtatatggctcgacgatggcaccggtcgggcaaatcgtcatacaggccacgcatttgccgcatccttcctcgactggttgatccacgggcagcggaatatcgaccagcaattcgcctaaaaagaagaacgaaccggcctcgcgattgaggataagtgagtgcttacctgtccagccgagcccagctttttcagctaacgggcgctcgagaataggcgcagaatcgacaaacggtctaaaattcagcgaaacacaatgttgctgaatcatctcgcccagctttttgagtcggttgcgcagaagtttgtgatagtcacggcccagcgcataacggctaacatagccgagtttggggtttttcagcgtgctggcaaatgcggcgttagcaggaaggtaattcatccgcacgctgatcacgcgcagcgtaccgggcaataactcatgagggcgagcgcgcagcataccgtgacgtgccatccagtccatttcgccgtggtattgtttgtccagccatgcttgcagtttgggctcggactcgctgagatcggtatcggtaatacctacctgctgaaagcccagttccagcccccactgtttaattttttgcgctaactgattgagatcgaggggctctgacatgacggaccatacaatgaagaaaaaccccgtaagtataccacacaccgtctggtacgccgacgatatccgccgcggagaacgcgaggcggcagatgtgctggggctcacactctatgagctgatgcttcgcgctggcgaggccgcattccaggtgtgtcgttcggcgtatcctgacgcccgccactggctggtgctgtgcggtcatggtaataacggcggcgatggctacgtggtcgcgcgactggccaaagcggtcggcattgaggtcacgttgttggcccaggagagcgacaaaccgttgccggaagaggccgcgctggcacgcgaagcatggttaaacgcgggtggcgagatccatgcttcgaatattgtctggcccgaatcggtagatctgattgttgatgcgctgctcggtaccggtttgcggcaagcgccccgcgaatccattagccagttaatcgaccacgctaattcccatcctgcgccgattgtggcggttgatatcccttccggcctgctggctgaaactggcgctacgccaggcgcggtgatcaacgccgatcacaccatcacttttattgcgctgaaaccaggcttgctcactggaaaagcgcgggatgttaccggacaactgcattttgactcactggggctggatagttggctggcaggtcaggagacgaaaattcagcggttttcagcagaacaactttctcactggctaaaaccgcgtcgcccgacttcgcataaaggcgatcacgggcggctggtaattatcggtggcgatcacggcacggcgggggctattcgtatgacgggggaagcggcgctgcgtgctggtgctggtttagtccgagtactgacccgcagtgaaaacattgcgccgctgctgactgcacgaccggaattgatggtgcatgaactgacgatggactctcttaccgaaagcctggaatgggccgatgtggtggtgattggtcccggtctgggccagcaagagtgggggaaaaaagcactgcaaaaagttgagaattttcgcaaaccgatgttgtgggatgccgatgcattgaacctgctggcaatcaatcccgataagcgtcacaatcgcgtgatcacgccgcatcctggcgaggccgcacggttgttaggctgttccgtcgctgaaattgaaagtgaccgcttacattgcgccaaacgtctggtacaacgttatggcggcgtagcggtgctgaaaggtgccggaaccgtggtcgccgcccatcctgacgctttaggcattattgatgccggaaatgcaggcatggcgagcggcggcatgggcgatgtgctctctggtattattggcgcattgcttgggcaaaaactgtcgccgtatgatgcagcctgtgcaggctgtgtcgcgcacggtgcggcagctgacgtactggcggcgcgttttggaacgcgcgggatgctggcaaccgatctcttttccacgctacagcgtattgttaacccggaagtgactgataaaaaccatgatgaatcgagtaattccgctccctgatgagcaggcaacattagacctgggcgagcgggtagcgaaagcctgcgatggcgcaaccgtaatctatctgtatggcgatttaggcgcaggtaaaaccacctttagccggggctttttacaggctctgggtcatcagggtaatgtcaaaagccccacttatacgctggtcgaaccctatacgctcgacaacttaatggtctatcactttgatttgtaccgccttgccgatcccgaggagctggagtttatggggatccgcgattattttgccaacgatgccatctgcctggtggagtggccacaacaaggtacaggtgttcttcctgacccggatgtcgaaatacacattgattatcaggcacaaggccgtgaggcgcgcgtgagtgcggtttcctctgcgggtgaattgttgctggcgcgtttagccggttaacctttgaaaggtggcgggatgatgtatcgcatcagaaattggttggtagcgacgctgctgctgctgtgcacgccggtgggtgccgcgacgctctctgatattcaggtttctaacggtaatcaacaggcgcggataacgttgagttttattggcgatcctgattatgcgtttagccatcaaagcaaacgcaccgtggcgctcgatatcaaacaaacgggcgtgattcagggactgccgttgttgttcagcggcaataatctggtgaaggcgattcgctctggaacgcctaaagatgcacaaacgctacggctggtggtcgatcttaccgaaaacggtaaaaccgaagcggtgaagcggcagaatggcagcaattacactgtcgtctttacgattaacgccgatgtgccgccaccgcctcctccgccgcccgtggttgcgaaacgcgttgaaacgcctgcggttgtcgcaccgcgcgtcagcgaaccggcgcgcaatccgtttaaaacggaaagtaaccgcactacgggtgttatcagcagtaatacggtaacgcgtccggcagcgcgcgcgacggctaacactggcgataaaattatcatcgctattgatgccggacacggcggtcaggaccctggcgctatcggccccggtggtacgcgggagaaaaatgtcaccatcgccatcgcgcgtaaattgcgtactttgctcaatgacgatccgatgtttaaaggcgttttaacccgtgacggggattactttatctcggtgatggggcgcagtgatgtggcacgtaagcaaaacgccaatttcctcgtgtcgattcacgctgatgccgcaccgaaccgcagtgcgactggcgcttccgtatgggtgctctctaaccgtcgcgccaacagtgaaatggccagctggctggagcagcacgagaaacagtcggagctgctgggtggggcgggtgatgtgctggcgaacagtcagtctgacccctatttaagccaggcggtgctggatttacagttcggtcattcccagcgggtagggtatgatgtagcgaccagtatgatcagtcagttgcaacgcattggcgaaatacataaacgtcgaccagaacacgccagccttggcgttctgcgctcgccggatatcccatcagtactggtcgaaaccggttttatcagcaacaacagcgaagaacgtttgctggcgagcgacgattaccaacaacagctggcagaagccatttacaaaggcctgcgcaattacttccttgcgcatccgatgcaatctgcgccgcagggtgcaacggcacaaactgccagtacggtgacgacgccagatcgcacgctgccaaactaaggacgattgatgccaattcaggtcttaccgccacaactggcgaaccagattgccgcaggtgaggtggtcgagcgacctgcgtcggtagtcaaagaactagtggaaaacagcctcgatgcaggtgcgacgcgtatcgatattgatatcgaacgcggtggggcgaaacttatccgcattcgtgataacggctgcggtatcaaaaaagatgagctggcgctggcgctggctcgtcatgccaccagtaaaatcgcctctctggacgatctcgaagccattatcagcctgggctttcgcggtgaggcgctggcgagtatcagttcggtttcccgcctgacgctcacttcacgcaccgcagaacagcaggaagcctggcaggcctatgccgaagggcgcgatatgaacgtgacggtaaaaccggcggcgcatcctgtggggacgacgctggaggtgctggatctgttctacaacaccccggcgcggcgcaaattcctgcgcaccgagaaaaccgaatttaaccacattgatgagatcatccgccgcattgcgctggcgcgtttcgacgtcacgatcaacctgtcgcataacggtaaaattgtgcgtcagtaccgcgcagtgccggaaggcgggcaaaaagaacggcgcttaggcgcgatttgcggcaccgcttttcttgaacaagcgctggcgattgaatggcaacacggcgatctcacgctacgcggctgggtggccgatccaaatcacaccacgcccgcactggcagaaattcagtattgctacgtgaacggtcgcatgatgcgcgatcgcctgatcaatcacgcgatccgccaggcctgcgaagacaaactgggggccgatcagcaaccggcatttgtgttgtatctggagatcgacccacatcaggtggacgtcaacgtgcaccccgccaaacacgaagtgcgtttccatcagtcgcgtctggtgcatgattttatctatcagggcgtgctgagcgtgctacaacagcaactggaaacgccgctaccgctggacgatgaaccccaacctgcaccgcgttccattccggaaaaccgcgtggcggcggggcgcaatcactttgcagaaccggcagctcgtgagccggtagctccgcgctacactcctgcgccagcatcaggcagtcgtccggctgccccctggccgaatgcgcagccaggctaccagaaacagcaaggtgaagtgtatcgccagcttttgcaaacgcccgcgccgatgcaaaaattaaaagcgccggaaccgcaggaacctgcacttgcggcgaacagtcagagttttggtcgggtactgactatcgtccattccgactgtgcgttgctggagcgcgacggcaacatttcacttttatccttgccagtggcagaacgttggctgcgtcaggcacaattgacgccgggtgaagcgcccgtttgcgcccagccgctgctgattccgttgcggctaaaagtttctgccgaagaaaaatcggcattagaaaaagcgcagtctgccctagcggaattgggtattgatttccagtcagatgcacagcatgtgaccatcagggcagtgcctttacccttacgccaacaaaatttacaaatcttgattcctgaactgataggctacctggcgaagcagtccgtattcgaacctggcaatattgcgcagtggattgcacgaaatctgatgagcgaacatgcgcagtggtcaatggcacaggccataaccctgctggcggacgtggaacggttatgtccgcaacttgtgaaaacgccgccgggtggtctgttacaatctgttgatttacatccggcgataaaagccctgaaagatgagtgatatcagtaaggcgagcctgcctaaggcgatttttttgatggggccgacggcctccggtaaaacggcgttagccattgagctgcgtaaaattttaccagtagagttgataagcgttgattctgcccttatttacaaagggatggatatcgggacggcgaagccgaacgctgaagagttactcgccgcgccgcaccgattgctggatattcgcgatccgtcgcaggcttactcggctgctgattttcgccgcgatgcgctggcggaaatggccgatatcaccgcggcggggcggatcccactgttagtgggcggtacgatgttgtatttcaaggcattgctggaagggttgtcgccgctaccgtcggcagacccggaagtacgggccagaattgagcaacaggcggcagagcaaggttgggagtcattgcatcgtcaacttcaggaggtagatccggttgcggcagcaaggattcatccaaatgatccacaaaggctttcccgggcactggaagtttttttcatttcgggtaaaactttaacggaactgacgcaaacgtcaggagacgctctaccgtatcaggtgcatcagttcgccatcgccccggcgagccgtgaactgctccatcaacgcattgagcagcgttttcatcagatgttggcttcaggttttgaagcagaagtccgggcgctttttgcccgaggagatttgcatacggacttgccttccattcgttgcgtgggttatcgccagatgtggtcttaccttgaaggcgaaatctcatacgatgaaatggtttatcgaggtgtttgcgccacgagacagttggcgaagcggcagataacctggctgcgtggttgggaaggggttcactggcttgacagtgaaaaaccagaacaggcgcgtgacgaagtattacaggttgttggtgctatcgcaggctgaatgtgtacaattgagacgtatcgtgcgcaattttttcagaatcgaaaggttcaaagtacaaataagcatataaggaaaagagagaatggctaaggggcaatctttacaagatccgttcctgaacgcactgcgtcgggaacgtgttccagtttctatttatttggtgaatggtattaagctgcaagggcaaatcgagtcttttgatcagttcgtgatcctgttgaaaaacacggtcagccagatggtttacaagcacgcgatttctactgttgtcccgtctcgcccggtttctcatcacagtaacaacgccggtggcggtaccagcagtaactaccatcatggtagcagcgcgcagaatacttccgcgcaacaggacagcgaagaaaccgaataaggtttcgggctgtttttttacacggggagccagcgatcctgcgttccccgctgatctatttagagggttatacgcttgtttgaccgttatgatgctggtgagcaggcgctactggtacacatctattttacgcaagacaaagatatggaagacctccaggagtttgaatctctggtctcttccgccggtgtcgaagcattgcaggtgattaccggtagccgtaaagcgccgcacccaaagtattttgtaggtgaaggtaaagcagttgaaattgcggaagctgtcaaagcgacgggtgcttcggtcgttctttttgaccatgccctgagcccggcgcaagagcgtaacctggagcgtttgtgcgagtgtcgtgttatcgaccgcaccggccttattttagatattttcgcccaacgtgcgcgtacccatgagggtaagttgcaggttgagctggcgcagctgcgccatctggctacgcgcctggtgcgtggctggacccaccttgaaagacagaaaggcgggataggtttgcgtggtccgggtgaaacccagctcgaaaccgaccgtcgtttgttgcgtaatcgcatcgtgcagatacagtcgcgcctggaaagagttgaaaagcagcgtgagcaggggcggcaatcgcgtatcaaagccgacgttcctactgtttcgctggtgggatataccaacgccggtaaatctacccttttcaatcgcatcaccgaagcgcgggtctacgcggcagaccagttgtttgccaccctcgacccgacgttgcggcgtattgacgttgcagatgtcggtgaaaccgtacttgcagataccgtagggtttattcgccacctgccgcacgatctggtggcggcatttaaagccacgttacaagagacgcggcaagccacattactgctgcacgtcattgatgcggcggatgtgcgtgtacaagaaaacatcgaagcggtgaatacggttcttgaagagatcgacgctcacgagatcccaaccctgctggtgatgaacaagatcgatatgctggaagatttcgaaccgcgtattgatcgggacgaagagaacaaaccgatccgtgtctggctttccgcacagaccggagcggggataccacagctttttcaggctttgacggagcggctttccggcgaggtggcgcagcatacattgcgtctgccaccgcaggaagggcgtctgagaagtcgtttttatcagcttcaggcaatagaaaaagagtggatggaggaggacggcagcgtaagtctgcaagttcgtatgccgatcgttgactggcgtcgcctctgtaaacaagaaccggcgttgatcgattacctgatctaacggcgtagcgtctgaagcgtggagtcatatcctctggcgtcgaaagacaacagggatcaccgcataacaaatatggagcacaaacatggcgtggaatcagcccggtaataacggacaagaccgcgacccgtggggaagcagcaaacctggcggcaactctgagggaaatggaaacaaaggcggtcgcgatcaagggccacctgatttagatgatatcttccgcaaactgagcaaaaagctcggtggtctgggcggcggtaaaggcaccggatctggcggtggcagttcatcgcaaggcccgcgcccgcagcttggcggtcgtgtcgttaccatcgcagcggcagcgattgtcattatctgggcggccagtggtttctataccattaaagaagccgaacgcggcgtggtaacacgctttggtaaattcagccatctggttgagccgggtctgaactggaaaccgacgtttatcgacgaagtcaaaccggtgaacgtggaagccgtgcgtgaactggccgcttctggtgtgatgctgacgtcggacgagaacgtagtgcgcgttgagatgaacgtgcagtaccgcgtcaccaatccggaaaaatatctgtatagcgtgaccagcccggatgacagcctgcgtcaggctaccgacagcgccctgcgtggagttatcggtaaatacaccatggaccgcattctgacggaaggtcgtaccgtgattcgtagcgatactcagcgcgaactggaagagacgattcgtccgtatgacatgggtatcacgctgctggacgtcaacttccaggctgctcgtccgccggaagaagtaaaagcggcgtttgacgatgcgattgccgcgcgtgaaaacgaacagcaatacattcgtgaagcagaagcgtataccaacgaagttcagccgcgtgcgaacggtcaggcgcaacgtatcctcgaagaggcgcgtgcgtacaaggcccagaccatcctggaagctcagggtgaagtggcgcgctttgctaaacttctgccggaatataaagccgcgccggaaattactcgcgagcgtctgtatatcgagacgatggaaaaagtgttgggtaacacccgcaaagtgctggttaacgataaaggtggcaacctgatggttctgccgttagaccagatgctgaaaggtggtaacgcccctgcggcgaagagcgataacggtgccagcaatctgctgcgtctgccgccagcctcttcctccacaaccagtggagcaagcaacacgtcgtccaccagtcagggcgatattatggaccaacgccgcgccaacgcgcagcgtaacgactaccagcgtcagggggaataacgatgcgtaagtcagttatcgcgattatcatcatcgtgctggtagtgctttacatgtctgtctttgtcgtcaaagaaggtgagcgcggtattacgctgcgttttggtaaggtactgcgtgacgatgacaacaaacctctggtttatgagccgggtctgcatttcaagataccgttcattgaaacggtgaaaatgctcgacgcacgtattcagaccatggacaaccaggccgaccgctttgtgaccaaagagaagaaagacctgatcgtcgactcttacatcaaatggcgcatcagcgatttcagccgttactacctggcaacgggtggtggcgacatttcgcaagcggaagtgctgttgaaacgtaagttctctgaccgtctgcgttctgaaattggtcgcctggacgtgaaagatatcgtcaccgattcccgtggtcgtctgaccctcgaagtacgtgacgcgctgaactccggttctgcgggtacagaagatgaagttactaccccggcggcagataacgccattgccgaagcggcagagcgcgtaacggctgagacgaagggcaaagttccggtcatcaacccgaacagtatggcggcgctgggtattgaagttgtcgatgtgcgtatcaagcagatcaacctgccgaccgaagtgtctgaagcgatctacaaccgtatgcgcgccgagcgtgaagcggtagcgcgtcgtcaccgttcacaaggtcaggaagaagcggaaaaactgcgcgcgactgccgactatgaagtgaccagaacgctggcagaagctgagcgtcagggccgcatcatgcgtggtgaaggcgatgccgaagcagccaaactgtttgctgatgcattcagtaaagatccggacttctacgcattcatccgtagcctgcgtgcttatgagaacagcttctctggcaatcaggacgtgatggtcatgagcccggatagcgatttcttccgctacatgaagacgccgacttccgcaacgcgttaatataacgactgcggtacaggtcaataaagccaccgcatcctcagggatgtcggtggttttctttttctataaggataatgaatgaattcgacaatctggctggcgcttgccctggttttggtactggaaggtttagggccgatgctttacccgaaggcatggaagaagatgatctctgcgatgaccaatttgcccgataatattttacgtcgttttggcggtggacttgtggttgcgggcgttgtggtctactacatgttgaggaaaacgattggctgaacaaaaaacagactgatcgaggtcatttttgagtgcaaaaagtgctgtaactctgaaaaagcgatggtagaatccatttttaagcaaacggtgattttgaaaaatgggtaacaacgtcgtcgtactgggcacccaatggggtgacgaaggtaaaggtaagatcgtcgatcttctgactgaacgggctaaatatgttgtacgctaccagggcggtcacaacgcaggccatactctcgtaatcaacggtgaaaaaaccgttctccatcttattccatcaggtattctccgcgagaatgtaaccagcatcatcggtaacggtgttgtgctgtctccggccgcgctgatgaaagagatgaaagaactggaagaccgtggcatccccgttcgtgagcgtctgctgctgtctgaagcatgtccgctgatccttgattatcacgttgcgctggataacgcgcgtgagaaagcgcgtggcgcgaaagcgatcggcaccaccggtcgtggtatcgggcctgcttatgaagataaagtagcacgtcgcggtctgcgtgttggcgaccttttcgacaaagaaaccttcgctgaaaaactgaaagaagtgatggaatatcacaacttccagttggttaactactacaaagctgaagcggttgattaccagaaagttctggatgatacgatggctgttgccgacatcctgacttctatggtggttgacgtttctgacctgctcgaccaggcgcgtcagcgtggcgatttcgtcatgtttgaaggtgcgcagggtacgctgctggatatcgaccacggtacttatccgtacgtaacttcttccaacaccactgctggtggcgtggcgaccggttccggcctgggcccgcgttatgttgattacgttctgggtatcctcaaagcttactccactcgtgtaggtgcaggtccgttcccgaccgaactgtttgatgaaactggcgagttcctctgcaagcagggtaacgaattcggcgcaactacggggcgtcgtcgtcgtaccggctggctggacaccgttgccgttcgtcgtgcggtacagctgaactccctgtctggcttctgcctgactaaactggacgttctggatggcctgaaagaggttaaactctgcgtggcttaccgtatgccggatggtcgcgaagtgactaccactccgctggcagctgacgactggaaaggtgtagagccgatttacgaaaccatgccgggctggtctgaatccaccttcggcgtgaaagatcgtagcggcctgccgcaggcggcgctgaactatatcaagcgtattgaagagctgactggtgtgccgatcgatatcatctctaccggtccggatcgtactgaaaccatgattctgcgcgacccgttcgacgcgtaattctggtacgcctggcagatattttgcctgccgggcgaacagtgtgatacattgctgtgtcgggtaagccattacgctatccgacacagtgttaaatcctcgcttttttccttccccgaactgaaataaattagcgacacagcttgtggctggtttatcatcaatataaatgtattttttcccgatttcccttttgaggttgatgtgcagttaacgagtttcactgattacggattacgtgcgctgatctacatggcgtcattgccagaagggcggatgaccagtatttctgaagtgactgacgtctacggcgtctcccgtaatcatatggtcaaaataatcaatcaacttagtcgtgccggctacgtgactgctgttcgtggaaaaaatggcggcattcgcctgggtaaaccggcgagtgcgatacgtattggtgatgtggtgcgcgagctggagcccttatcgctggtgaattgcagcagtgagttttgccacattacacctgcctgtaggttgaaacaggcactttctaaggccgtgcaaagttttcttacggaactggataactacacgcttgccgatttggttgaagagaatcaaccgctttataaattattgctggtggagtgacgaaaatcttcatcagagatgacaacggaggaaccgagatgtcacaagatcctttccaggaacgcgaagctgaaaaatacgcgaatcccatccctagtcgggaatttatcctcgaacatttaaccaaacgtgaaaaaccggccagccgtgatgagctggcggtagaactgcacattgaaggcgaagagcagcttgaaggcctgcgtcgccgcctgcgcgcgatggagcgcgatggtcaactggtcttcactcgtcgtcagtgctatgcgctgccggaacgcctcgacctggtgaaaggtaccgttattggccaccgtgatggctacggctttctgcgggttgaagggcgtaaagatgatttgtatctctccagcgagcagatgaaaacctgcattcatggcgatcaggtgctggctcagccgctgggtgctgaccgtaaaggtcgtcgtgaagcgcgtattgtccgcgtactggtgccaaaaaccagccagattgttggtcgctactttaccgaagcgggcgtcggctttgtggttcctgacgacagccgtctgagcttcgatatcttaatcccgcccgatcagatcatgggcgcgcggatgggctttgtggtcgtagtcgaactgactcagcgtccgactcgccgcaccaaagcggtgggtaaaatcgtcgaagtgctgggcgacaatatgggcaccggcatggcggttgatatcgctctgcgtacccatgaaattccgtacatctggccgcaggctgttgagcaacaggttgccgggctgaaagaagaagtgccggaagaagcaaaagcgggccgtgttgatctgcgcgatttaccgctggtcaccattgatggcgaagacgcccgtgactttgacgatgcagtttactgcgagaaaaaacgcggcggcggctggcgtttatgggtcgcgattgccgacgtcagctactatgtgcgtccgtcaacgccgctggacagagaagcgcgtaaccgtggcacgtcggtgtacttcccttcgcaggttatcccgatgctgccggaagtgctctctaacggcctgtgttcgctcaacccgcaggtagaccgcctgtgtatggtgtgcgagatgacggtttcgtcgaaaggccgcctgacgggctacaaattctacgaagcggtgatgagctctcacgcgcgtctgacctacaccaaagtctggcatattctgcagggcgatcaggatctgcgcgagcagtacgccccgctggttaagcatctcgaagagttgcataacctctataaagtgctggataaagcccgtgaagaacgcggtgggatctcatttgagagcgaagaagcgaagttcattttcaacgctgaacgccgtattgaacgtatcgaacagacccagcgtaacgacgcgcacaaattaattgaagagtgcatgattctggcgaatatctcggcggcgcgtttcgttgagaaagcgaaagaaccggcactgttccgtattcacgacaagccgagcaccgaagcgattacctctttccgttcagtgctggcggagctggggctggaactgccgggcggtaacaagccggaaccgcgtgactacgcggagctgctggagtcggttgccgatcgtcctgatgcagaaatgctgcaaaccatgctgctgcgctcgatgaaacaggcgatttacgatccagaaaaccgtggtcactttggcctggcattgcagtcctatgcgcactttacttcgccgattcgtcgttatccagacctgacgctgcaccgcgccattaaatatctgctggcgaaagagcaggggcatcagggcaacaccactgaaaccggcggctaccattattcgatggaagagatgctgcaactgggtcagcactgttcgatggcggaacgtcgtgccgacgaagcaacgcgcgatgtggctgactggctgaagtgtgacttcatgctcgaccaggtaggtaacgtctttaaaggcgtaatttccagcgtcactggctttggcttcttcgtccgtctggacgacttgttcattgatggtctggtccatgtctcttcgctggacaatgactactatcgctttgaccaggtagggcaacgcctgatgggggaatccagcggccagacttatcgcctgggcgatcgcgtggaagttcgcgtcgaagcggttaatatggacgagcgcaaaatcgactttagcctgatctccagcgaacgcgcaccgcgcaacgtcggtaaaacggcgcgcgagaaagcgaaaaaaggcgatgcaggtaaaaaaggcggcaagcgtcgtcaggtcggtaaaaaggtaaactttgagccagacagcgccttccgcggtgagaaaaaaacgaagccgaaagcggcgaagaaagacgcgagaaaagcgaaaaagccatcggcgaaaacgcagaaaatagctgcagcgaccaaagcgaagcgtgcggcgaagaaaaaagtggcagagtgatcaataccctctttaaaagaagagggttagattgctgacaaaatgcgctttgttcatgccggatgcggcgtgaacgccttatccggcctacataatcacgcaaattcaatatattgcagagatcatgtaggccggataaacgtagtgcatcaggcaaaacgtaaacaacgagtacattaatgagcgaaatgatttacggcatccacgcagtgcaggccctgctggagcgcgcccctgaacgttttcaggaagtctttattttaaaaggccgtgaagataaacgtctgttaccgctgattcacgcccttgagtctcagggcgtggttatccagttggcaaaccgccaatatctcgacgagaaaagcgacggtgccgtgcatcagggcattatcgcccgcgtgaagccaggacgtcagtatcaggaaaacgatctgccggatctgatcgcttcgctcgatcaaccgttcctgctgatcctcgacggcgtaaccgatccgcacaacctcggcgcgtgcctgcgtagtgcggacgccgcaggcgttcatgcggtgattgtgccgaaagatcgctccgcacagctcaacgctacggcgaaaaaagtagcctgcggcgcggcagaaagcgttccgctgattcgggtgactaaccttgcgcgcaccatgcgtatgttgcaggaagagaatatctggatcgtcggtacggcaggcgaggcggatcatacactctatcagagcaaaatgaccggacgcctggcgctggtgatgggtgcggaaggtgaaggtatgcgtcgcctgactcgtgaacattgcgatgagttgatcagcatcccgatggctggaagcgtttcttccctgaacgtttcggttgcgaccggaatttgcttatttgaagcggtgcgccagcgcagctaatttctcagaattatgaaaagccatccagatttggatggtttttttttgtctatagctggtaagataattacgtattgcaaatattcattttattaatatttaaacttaatctatatggaataatatatgacatggaatccgttggcgctagcgacggcgctgcaaactgtacctgaacaaaatattgatgtaacaaatagcgagaacgcattaattattaaaatgaatgattatggcgatttgcaaatcaatattctttttacttcccgccaaatgattatcgaaacctttatttgtccggtgagtagtatcagcaatccagatgaatttaataccttcttattaagaaatcagaagatgatgccgttgtcatcggtagggatctccagcgtacaacaggaagagtattacattgttttcggggcgttatcgcttaaatcttctcttgaagatatcctgcttgagataacctcgctggtagataacgcattggatctggctgaaattacagaagaatattcacactaattacaaggacgggtatttatgggaattttaaaaagtttatttacgctggggaaatcgtttatctcccaggcggaagaatccattgaagaaacccagggcgtgcgcatgctggaacagcatattcgtgacgctaaagctgaactcgataaagccggaaaatctcgcgttgatctgctggcgcgggtgaaattaagtcacgataagctgaaagatttacgtgagcgcaaagccagtctggaagcccgtgcgctggaagcgttaagcaagaacgttaatccgtcgttgattaacgaagttgctgaagaaatcgcgcgccttgagaatctcattaccgctgaagagcaagtgttgtcgaatctggaagtctcccgtgatggcgtggaaaaagcagttacagcgacagcgcagcgtatcgctcagtttgagcagcaaatggaagtcgttaaagccactgaagccatgcagcgtgcacaacaggctgtaacaacctctaccgttggcgcatcttccagcgtttcgacagcggcagaatccttaaaacgcctgcaaacgcgtcaggccgaacgtcaggctcgcctggatgctgccgcacagttggagaaagtcgcagacggtcgcgaccttgacgaaaagctggcggaagccggaattggcggtagcaataaaagtagcgcccaggatgtattagcaagactgcaacgccaacagggcgagtaatttttttgccagcctcgctaaaaggctggcaactattttaaggataaaatatgtctggttttttccagcgtctgtttggcaaggataataagccagctatcgctcgtggtccgctgggacttcatctcaatagtggctttacgctcgacacgttagcgtttcgtttgctggaagatgaattgctgattgcgctgccgggtgaggaatttacggtagccgccgtcagccacatcgatctgggcggcggtagtcagattttccgctactacacttcaggcgatgagtttctgcaaatcaataccaccggcggcgaagatattgatgacattgatgatatcaagctctttgtctatgaagagagctacggtatcagtaaagagagtcactggcgcgaggcgatcaacgccaaagcgatgggagcaatgaccttaaactggcaggaaaaacgctggcagcgattttttaacagcgaagaaccgggaaatatcgaacccgtctacatgctggaaaaagtagaaaatcaaaaccatgccaaatgggaggtccataattttaccatgggctaccaacggcaagtaaccgaagatacttacgaatatttgctgctaaatggtgaggaatcttttaacgatctcggcgagccagagtggttattttcgcgcgcgttgggtgtcgatatcccgctgacatcacttcatattattggttaattacaaggacgtttacaatgcatatactggattcacttcttgcctttagcgcctatttttttattggcgtggctatggtgattatttttctgtttatctattctaaaattacaccgcacaacgaatggcagttaatcaaaaacaataataccgcggcgtcactggcgttcagcggtacattgttgggttacgttatccccttatccagtgcggcaatcaatgcggtgagtattccagactatttcgcctggggcgggattgcactggtgattcagttactcgtttttgctggtgtcagactttatatgcccgcattaagcgaaaaaattattaatcacaataccgcagcaggaatgtttatgggaaccgccgcgctggctggcggtatttttaacgcagcttgtatgacatggtaatggacgatcatggccagaaaacgcaaatcaagaaataacagtaaaattggtcacggagcgattagtcgcattggtagaccgaataatccttttgaaccgcgtcgcaatcgctacgcacaaaaatacttaacgttggcgctaatgggcggtgccgcttttttcgtattgaaaggttgtagcgatagtagcgatgtcgataacgacggcgacggaacgttttacgcgacagtgcaggattgtattgatgacggtaataatgccgacatttgcgcgcgtggctggaacaacgccaaaacggcattttatgccgatgttccgaagaatatgactcagcagaactgtcagtctaagtacgaaaattgctactacgacaatgttgaacagagttggatcccggtcgtttctggatttttgttaagccgggttattcgtaaagatcgcgatgagccgtttgtttataacagcggcggttcctcttttgcttcgcgcccagtctggcgcagcacttctggtgattactcttggcgctccggttctggcaaaaaagagtcttactcttcgggcggctttaccaccaaaaaagcgtctaccgtttctcgcggcggctatggtcgttcttccagcgcccgtgggcattggggaggctaatcatgctgagacacaacgttcctgtgcgacgggatctggaccagatcgccgctgacaacggtttcgactttcatatcatcgacaatgaaatctattgggatgagagtcgggcttaccgttttactctgcgccagattgaagagcagatcgaaaaaccgactgcggaactgcatcagatgtgccttgaggtggtggatcgcgcggtaaaagatgaagagatcctgacgcaactggcgatcccgccgttgtactgggatgtgatcgctgaaagctggcgcgcccgcgatccttcgctgtatggacggatggattttgcctggtgtggcaatgcgccggtgaagctgctggagtacaacgccgatacgccaacttcattgtacgagtcggcttatttccagtggctgtggctggaggatgcccggcgcagcggcattattccgcgtgatgccgatcagtacaatgctattcaggaacgcctgatttcacgctttagcgagctttacagtcgggaaccgttttatttttgctgctgtcaggacaccgatgaagacaggagtaccgtgctgtacttgcaggactgcgcccagcaggcagggcaggagtcgcggtttatctacattgaagatctcggtttgggcgtcggcggcgtactgaccgatcttgatgataatgtcatccagcgtgcatttaagctgtatccgctggagtggatgatgcgtgacgataacggtccgctgctgcgcaagcgtcgcgagcaatgggtggagccgttatggaaaagtatcttgagtaataaagggctaatgccgctgctttggcgcttcttccctggtcatcctaaccttcttgcatcctggtttgagggtgaaaaatcgcagattgccgctggcgaaagctatgtgcgtaaaccgctctactcgcgcgaaggcggaaatgtcaccattttcgacggccagaataacgtcgttgaccacgctgatggtgattacgccgatgaaccgatgatctaccaggcgtttcaacctctgccgcggtttggcgatagctacacactcatcggtagctggattgtcgatgatgaagcgtgcggaatggggatccgtgaagataacacactgatcaccaaagacacctcacgtttcgttccgcattacattgctggataagaatgttttagcaatctctttctgtcatgaatccatggcagtgaccatactaatggtgactgccattgatggagggagacacagtgcactggcaaactcacaccgtttttaatcaacctataccattaaataacagcaacttatacctgtctgatggcgcgctctgcgaagcggtaacgcgtgaaggtgctggctgggatagcgattttctagccagtattggtcagcagttaggaacggctgaatcccttgaactggggcggctggcgaatgtgaatccgcctgaattattgcgctacgatgcgcaaggacgccgtctggacgatgtgcgttttcaccccgcctggcacctgctgatgcaggcgctatgtaccaatcgggtgcacaatcttgcctgggaagaagacgctcgctccggcgcatttgtggcgcgcgcggcgcgttttatgttacatgcgcaggttgaggcagggtcgttatgtccgataaccatgacctttgccgccacgccattgttgttacagatgttacccgcgccgtttcaggactggaccacgccgctattgagcgatcgctacgattctcacttattgccaggtgggcaaaaacgcggtttgttgattggcatgggaatgacggaaaagcagggcggttccgatgttatgagcaacaccacccgtgcagagcgtctggaagatggctcttatcggctggtggggcataaatggtttttctcggttccgcaaagcgatgcgcatctggtgctggcgcagaccgcgggtggtctgtcctgcttttttgtgccgcgctttttgcctgacgggcaacgcaacgcgattcgcctcgagcggctgaaagataagctgggtaatcgctctaacgccagttgcgaagtggagtttcaggatgccattggttggttgttggggcaggaaggggaaggaattcgtctgatcctgaaaatgggtgggatgacgcgttttgattgcgccctgggtagccatgccatgatgcgccgtgcattttcgctggcgatttatcatgcacatcaacgccatgtttttggtaatccattgatccaacagccccttatgcgtcatgtcttaagtcgcatggcacttcagcttgaagggcaaacggcgttgctgtttcgtcttgcgcgagcgtgggaccggcgtgccgatgccaaagaagccctgtgggcgcgtttatttacgcctgcggcaaaatttgtgatctgcaaaagaggtatgccgtttgtggccgaagcgatggaggtgctgggcggcattggttattgcgaggagagcgagctgccgcggctttaccgggagatgccggtaaacagtatttgggaaggttccggcaatattatgtgcctggatgtgttgcgcgttctcaataagcaagcgggcgtatacgacttattgtcggaagcatttgtggaagtgaaagggcaggatcgctattttgatcgcgcggttcgtcgtttacagcagcagctgcgtaagccagctgaagaactggggcgagagattactcatcagctattcctgctgggctgcggtgcgcaaatgttgaaatatgcttctccgccaatggcgcaggcgtggtgtcaggtgatgttagatacgcgcggcggcgtacggttgtcagagcagatccagaatgatttattgctgcgggcgacggggggagtgtgtgtgtaagcgtatacgactgatgcgacgctggtttcgattaactaaatgaaatatgtgaaaattgtaggccggacaaggcgctcgcgccgcatccggcattgttcatttgctgtagatgacactcatgcatacagtatcgcctgtacgcgccagttatcaggctgctggtcttcgtacatggtaataatgcggtaccatgacgcaccttgttcatcggcctttaacgccacgatacgttccacgtcctgcggatcccctgaaatattgctaactgagatctgacctatttcattcaggcccgtcacgcagtcagcactggcgaattctgcagactgtgccgtggcgctcgcaggataagtcactaattgcagcgagggtgaggcaagtaattgtttcatcgtcagctccatttttcgtttccccacatgttgcagggcattccatcgcggtaataaacgcccaggcttccagccggtaatttattgtgcacaggtaaacgcatagggacgcaaagcaatgtaaagctgactatgtaagttgtctgatttatttacggtacaaaatggcttgtgaataccactgtcctgtcacgatggtttcgtccaccatgacgacaacgtaataatcagcttttgcagcgacagctttcgctttgatttctgctaatgcgtcatccggagacccccgaaccattgtgcttacgctacctattcgctgtaacccttgcgtctggtcgcggcgaatctcttgcggatggtccgttactggcggtgctggctgtggcgtaccttgcagtgcgctacaggcacttaacatcaacaccaataataaactggcaaaccggtaaataacgctattacgtttcctgctaaccatagtgtagtgccttattaatttaactttgggggaatgttcccgaattgttacctggtacgcgattttcgaatgaaaacgtgacgaaagcgtaacccacatctcaacattatgaactaataccgccagcagaaacttgtgctaaggatttcttcatgtcataccagacaaaaaggagagacagatgattgaaatagaatcacgcgagctggcagatattcccgttcttcatgcttatcctgtcggacaaaaagataccccgttaccgtgcgcgattttttatcacggctttacttcgtccagtctggtgtatagctattttgccgttgcgctggcgcaggctggtttgcgggtgatcatgccggatgcgcccgatcacggtagtcgttttagtggcgacgcagcgcggcggttaaatcaattctggcaaatcttgctacaaagtatgcaggaattcactactttacgtgcggcaatagccgaagaaaagtggctgcttgatgaccgtctggcagtcggtggtgcgtcgatgggcgcgatgacggcactggggattaccgctcgccaccccacggtgagatgtaccgccagcatgatgggatcgggctattttacatcgctcgcccgttcactgtttccaccgctgatacctgaaacggcagcacaacagaatgaattcaataacattgtcgcgccgctggcagagtgggaagcgacaaaccacctggaacaacttggtgacagacctctactgctgtggcatggcctcgacgatgacgttgtgcctgccgatgaatcactacgtttgcagcaggccttaagcgagacgggacgggataaactgctaacctgttcatggcagccaggcgtgcgtcaccgcattacgcctgaggcgttagatgctgcagtgacatttttccgccagcatctttaaacacgcagaatgctgaccccttgcgcttccagttgttgcaggatttccgggttagcatttttgccggtgatcagcatatcaatttgatcggcacggctaaaaagcattcccgcgcgttcgccaatcttactgctatcaaccagtaccaccagtttccctaccacgctcagcatcttctgctctgccattgccgtcagcatatcggttttatacaacccttctgctgtcagtcctttgccgctggtaaacatccagtgcccggcatagagactgttttcgctgccctgcgggcttaaagtgatggactgacttttgttgtactgtccgcccataatgatcacgctgtcatgttcttgatcgatcaggtaatttgccagcggtagataattagtgatgatttgcactggcttgccacacatttcccgcccaagcagaaacgcggtggagccgcagttgatgactacgctttcgcccggattaaccagctgcgaggccgctttagcgatacgtactttttcatcgtgattctgcgcctgatgcagattcatcggcgtccagcgcgggcgctgttgggtaatagcttctgcgccattgcgcacttttttcagtttgccgctttcgtcaagtttattgatatcgcgtcgcgcagtggcaggcgaaattcccagacgctcaacgactttctcaacggtcacaaagcccaattgtgcgagcatttccaggaggatttgatgtctttgtgcttcagtcatgagctattccgataaaatttgatttttttagatgatatttgaaatagccaggaaatactacgccggatagcgcgaactactccacgctatccggtataaacgacagattacaggaatgacttgaacggcagatccggttcaatagtgaagcaatcatcgaaaccacgcggatagtggtactcgaagttgtctttatccaacggccaggtaaatttgccgccaacctgccagataaacggcttgaagccatacttcaggcgatcttttttcatctcccacagcacgcggatctcttgcggatcggcctggaagtttgaccagatatcgtggtggaacgggataaccactttcgcattcagggcttcacccatacgcagcatatcggcgctggtcattttgtcggtgataccgcgcgggttttcgccgtatgaacctaaagccacgtcgatctgatgttcgttaccgtgcttcgcataatagttagagtagtgggagtcgccgctgtgatacagggagccgccaggcgttttgaacagatagttcaccgcgcgatcgtccatgccgtccggcagtacgccagccgctttttgatcggcaggcagggtgatcagtgcagtacggtcgaaagcgtcaagcgcatgaatttcaatgtctttcacttttacaacatcgcccggtttgaccacgatgcaacgctctttcggtacgccccagccaatccacaaatccacacaggttttcggtccaatgaacggtacgtcatcagcacagttctgcatcacagcagcagcgacgttgacgtcgatatgatcgttgtgatcgtgagtcgccagtaccgcgtcgacctggcgaatcgcaaacggatcaagaacaaacggggtggtgcgcaggtttggctgcagttttttcacgccagccatgcgctgcatttggtgaccctgtttcattaacgggttaccgtgactttgtttgccagtgccgcaccagaaatcaacgcaaacgttggtgccaccttccgattttaaccagatcccggtgcagccaagccaccacatcgcaaatgtgccaggagcgacctgttcttgttcaatttcttcattcaaccagctaccccactccgggaaagtgctcaggatccaggattcacgggtgatacttttcactttactcatcgccatttaccttcatgatagttcaattcgaatcaatatgtgatttgttttgattaatcctgacactattttttcaggaaggcaatgaccattttttgactttttgccaggtaagttgttgttgattttgagtgtggaaagatttaatggaatgtgtagttaaattaactaaatgaatttaaataaataattgtttcgttatgtgaatcccactctatccgtgtggaattatttgcgggtcgcgtcacatttaatcataaataatcttgttgtgattacttttgaaaattagagtgagtgcacaacattccgggtgtgcggaatacccggttacctcttcttcaggagatcgttatggagatcctctacaacatctttaccgtgttttttaaccaggtcatgaccaatgccccgttgttgctgggtattgtgacctgtctgggctacatcctactgcgcaaaagtgtcagcgttattattaaaggcacgattaaaactataattggtttcatgttgttgcaggcagggtccggcatcctcaccagcaccttcaaaccggtggtggcgaaaatgtccgaagtctacggcattaacggcgcaatttccgatacttacgcgtcgatgatggcaaccatcgaccgcatgggcgatgcctatagctgggtaggttacgcggtgttgttagcgctggcgctgaacatctgttacgtgctgctgcgtcgcattaccggtattcgtaccatcatgctgactggtcatatcatgttccagcaggcggggctgattgccgttacgttgtttattttcggctactccatgtggacaaccattatctgcacggcgattctggtttcgctctactggggcattacctccaacatgatgtacaagccgactcaggaagtgacggacggctgcggtttctccatcggtcaccagcagcagtttgcatcatggattgcctataaagttgcgccgttcctcggcaaaaaagaggaaagcgttgaagacctcaaactgccaggctggctgaatattttccacgacaacatcgtctccacggcgattgtcatgaccatcttctttggtgccattctgctctccttcggtatcgacaccgtgcaggcgatggcaggcaaagtgaactggacggtgtacatcctgcaaactggtttctcctttgcggtggcgatcttcatcatcactcagggcgtgcgcatgtttgtggcggaactctctgaagcatttaacggcatttcccagcgcctgatcccaggtgcggttctggcgattgactgtgcggctatttatagcttcgcgccgaacgccgtggtctggggctttatgtggggcactatcggtcagctgattgcggttggcatcctggtcgcctgcggttcctcgatcctgattattcctggctttatcccgatgttcttctccaacgccaccatcggcgtgttcgctaaccacttcggcggctggcgtgcggcgctgaagatttgtctggtgatggggatgatcgaaatctttggttgcgtctgggcggtgaaacttaccggtatgagtgcctggatgggtatggcggactggtcgattctggcaccgccgatgatgcagggcttcttctccatcggtatcgcctttatggccgtcatcattgtaattgcactggcttatatgttcttcgctggccgcgcactgcgcgcagaagaagatgcagaaaaacaactggcagaacagtctgcttaataaggagttttgattatgaccgtacgtattctggctgtgtgtggcaacggacaaggcagttccatgatcatgaagatgaaagtggaccagtttttaacccaatcaaacattgaccacacggtaaacagctgcgcggttggcgaatacaaaagcgagttgagcggcgcggatatcatcatcgcttctacgcacattgcgggcgaaatcaccgtgaccggcaacaaatacgtggttggtgtgcgcaacatgctctctcctgccgactttggcccgaaactgctggaagtgatcaaagagcatttcccgcaggatgtgaagtaaggacgcgccatgaaattacgtgattcgctggcggagaataaatccatccgcctgcaggctgaagctgagacatggcaggacgcagtaaaaatcggcgttgacctgctggtggcggcggatgttgtcgagccgcgttactaccaggcgattctggatgcggttgaacagcacggtccgtactttgtgctcgcaccaggcctggcaatgccgcacggtcgcccggaagagggcgttaagaaaaccggttttgcgctggtgacgctgaaaaagcctctggagttcaaccacgaagataacgacccggtggatatcctcatcaccatggcggcggtcgatgccaacacgcaccaggaagtgggcatcatgcagatcgtcaacctgtttgaagatgaagaaaatttcgaccgtttacgtgcctgccgtaccgagcaggaagtactggatctcattgaccgcaccaacgcggcagcttaagaaggaattgaagatgtcattaccgatgttacaagtcgcgctggacaaccagactatggatagcgcctacgaaaccactcgcctgattgccgaagaagtcgacattatcgaagtgggtaccattctgtgcgtgggcgaaggcgtgcgtgcggttcgcgatctgaaagcgctttacccgcacaaaatcgtactggcagacgccaaaattgccgatgcgggcaaaatcctctctcgtatgtgcttcgaagccaacgctgactgggtgacggtaatttgctgtgcggatatcaacaccgccaaaggcgcgctggacgtagcaaaagagtttaacggcgacgtgcagatcgaactgaccggctactggacctgggaacaggcgcagcagtggcgtgacgcaggcattcagcaggtggtttatcaccgcagccgtgacgcgcaggccgcaggcgtagcgtggggcgaagcggacattaccgcgatcaaacgtctttccgatatgggcttcaaagtcaccgtcaccggtggcctggcgctggaagatctgccgctgttcaaaggtattccgattcatgtgtttatcgctggtcgcagcatccgtgatgccgcttctccggttgaagctgcacgtcagttcaaacgttccatcgccgaactgtggggctaaggagcggatatgttgtccaaacaaatcccgcttggcatctatgaaaaagcgctccccgccggggagtgctggctggaacgcctgcaactggcaaaaacgttgggcttcgattttgtcgagatgtcggtagatgaaacggacgagcgcctgtcgcgcctcgactggagccgcgagcagcgtctggcgctggtgaacgcgattgttgaaaccggcgtgcgcgtgccgtccatgtgcctttctgctcatcgtcgtttcccgctgggcagtgaagatgacgcggtgcgggcgcaggggctggagattatgcgtaaagctatccagttcgcccaggatgtcggtattcgcgtgatccaactggcgggctatgacgtttactatcaggaagccaataacgaaacgcgtcgtcgtttccgtgacggcctgaaagagagcgttgagatggcaagccgcgcgcaggtgacgctggcgatggagatcatggattacccattgatgaactccatcagcaaggcgctgggctacgcgcactatctcaacaacccgtggttccagctctacccggatatcggcaacctctcggcgtgggacaacgacgtgcagatggagttgcaggccggaatcgggcatatcgtcgcggtacatgtgaaagacaccaaaccgggcgtcttcaaaaacgtgccgtttggcgaaggcgtggtggatttcgaacgttgtttcgaaacgctcaaacagagtggctattgcgggccgtacctgattgagatgtggagcgaaacggcggaagacccggcggcagaagtggcgaaagcgcgtgattgggtgaaagcgcgcatggcgaaagcgggcatggtggaggcggcataatgcaaaagctaaaacagcaggtatttgaagccaacatggagctgccgcgctacgggctggtgacctttacctggggcaacgtcagcgctatcgaccgcgaacgcgggctggtggtgatcaagcccagcggcgttgcctacgaaaccatgaaagcggccgatatggtggtggttgatatgagcggcaaggtggtggaaggggagtatcgcccatcttccgacaccgcgacgcatctcgaactctaccgtcgttacccgtcgcttggcggcattgtccatacccactccactcatgccaccgcatgggcgcaggcggggctggcgatcccggcgttaggcaccacgcacgctgactacttctttggtgatatcccgtgcacgcgcggattaagcgaagaagaggtgcagggtgagtacgaactgaacactggcaaagtgattatcgaaacgctgggcaacgccgagccgctgcatacgccgggaattgtggtgtatcagcacggaccgttcgcctgggggaaagatgcccacgacgcggtgcataacgcggtagtgatggaagaagtggcgaaaatggcgtggattgcgcgcagtattaatccacaactcaatcacatcgacagcttcctgatgaataaacacttcatgcgtaaacacggtcctaacgcttattacgggcagaagtagaacacgcgctgcggaaatttccttcctcgggagataactggtctaattccgcagccgtttttcaaaaaaagccccctgagaagggggcaaagcaaactatggcaatgtttctttggttatacctggtgctagcgataaatatccgcgctggcgtgcatattgccgttactccccggttcccgcatcagaatcacgtggtagtacgttgcgccctgcgcatctgtctcttcatttaatgcctgacgcgcttcgctttcagtggcgaaattatgattgatataaatcacgcctaagctttgcacatcgtccatatttctggcctggtggttattaatttcaatggctgcccatgtatttgcacttagcaaaagcacagccagaagggctaaaacacggctgaacatagatacctcctcgacggctgtttttgtgtgctctcctcatgtggtgatggtctgatttaattttaatcacggatgaaaaagttgatggcgaccatttctgatgcagttgttcaaaaaaacagcatgatgaagtgtgatgaacttcaaatcagcggcttagtggttatttgcgaaaggggagatttatttctgctctgcccttgagtttagcaaggtatgtcagtactataacgcgtcatttttcagccgacctttaacacgttccttgcctccccgggattcggctgacccagacaggaggctgaataatccgtaaggagcaattcgatgcgtcattacgaaatcgtttttatggtccatcctgaccagagcgaacaggttccgggcatgatcgagcgctacactgctgccatcactggtgcagaaggcaagatccaccgtctggaagactggggccgccgtcagctggcttacccgatcaacaaactgcacaaagcacactacgttctgatgaacgttgaagctccgcaggaagtgatcgatgagctggaaactaccttccgcttcaacgatgccgttattcgcagcatggttatgcgtaccaagcacgctgttaccgaagcatctccgatggttaaagcgaaagacgagcgccgcgagcgtcgcgatgatttcgcaaacgaaaccgcagatgatgcagatgctggggattctgaagagtaatttctgatgaccaaccgtctggtgttgtccggcaccgtgtgcaggactccccttcgaaaggtcagtccatcaggaattcctcactgccagttcgtgcttgagcatcgttctgtgcaggaggaagccggttttcaccggcaggcatggtgtcaaatgcccgttattgttagcggacacgaaaaccaggccattactcacagtataacggtcggcagtcgcataaccgttcaggggttcatttcatgccacaaggcaaagaacggactgagcaaaatggttttgcatgccgagcagattgaattgatagattctggagactagccatatggcacgttatttccgtcgtcgcaagttctgccgtttcaccgcggaaggcgttcaagagatcgactataaagatatcgctacgctgaaaaactacatcaccgaaagcggtaagattgtcccaagccgtatcaccggtacccgtgcaaaataccagcgtcagctggctcgcgctatcaaacgcgctcgctacctgtccctgctgccgtacactgatcgccatcagtaatcggtcacggtccattaatacgactttgagaggataaggtaatgcaagttattctgcttgataaagtagcaaacctgggtagcctgggtgatcaggtaaacgttaaagcgggctatgctcgtaacttcctggtaccgcagggtaaagctgttccagctaccaagaaaaacattgaattcttcgaagcacgtcgcgctgaactggaagctaaactggctgaagttctggcagctgctaatgctcgcgctgagaaaatcaatgcactggaaactgttaccatcgcgtctaaagctggcgacgaaggtaaactgttcggttccatcggtactcgcgacatcgctgacgctgtaactgcagctggcgttgaagtggctaagagcgaagttcgtctgccgaacggcgttctgcgtaccactggcgaacacgaagtgagcttccaggttcacagcgaagtattcgcgaaagtgatcgtaaacgtagtagctgaataattcgttattcaacgagacgtaaaaacgccgaccattggtcggcgttttgcttttgtagcgagcacttgcagatatcgataagggccacaataagcagccctacgaagataattacttagctgcctgaatatcagccagcattggggcaagggctgggttgtccttagcgaagtttgcgtacattggctgtactttctcgataaacggagctttatctacctggtagactttcacgcccattttatccagttttgcaaattcttgtttctcttcctcgctccacaagtctttcatgtagctcattgattctttagctgcttttaatataactgcctgattttcctggctaagtttatcaaacgcagcattgctcatcagaaccacatcgggaaccatagtgtgttcgtcaaggctgaaggattttgccacttcaccgtgacgcatggtagtcagcgccatcacgctgttttctgccatatcgaccacaccctgctgtaaggctgtatacaactcgccgtaatccagtggcgtcgggttaccgcccatgactttgatcatttcaactgcgccagggcttggctggacacggactttcatgcctttcagatcgtctggtttcagtactggtttattgccatagaaactgcgggcgcctccatcataaaaagtcagcccgaaataacctttgcttttcgttgagtcgaggatttttctcccgatatcgccctgcatgacctggtaataatgatcacgatcgcggaacaaataaggcaggctaaataatttataggaattttcaaatgcttccatttctgccgcattggtttttaccaggggaatagcgccagaacgaatcagctccattgtttctcgttgagtacccaatgttccatttggataaatacgaatagtaatatcaccgttagagtactctttgctctttttcgcaaagaactccatcgctttatgaacaggatgagacttatcctgattatgactcagttttaatgtcactgcccaggactggcttgcggataacataagaacagcaccgataatgccagcggatacttttattttcatagatgttccttttctaataaatatggcggcaggtgccgccagtgaatgcgcatcagtagcccagtgctcttggcaatgccatactgatttgcggaatataggtcaccattgccagcaccaataccatcacggcatagaatggcagcataggtttgataattttattaatcggtaatttagatacactacaaccgacaaataacacactgcctacaggcggagtacaaataccgatacacatgttcagtaccatgacaataccaaagtgaatcgggtccatgcccagttcggtgacaaccggtaaaaatatcggcgtaaaaatcagtaccgccggtgtcatatccataaaagtgccgataatcaacaggataatattgataataagcaggattattattgggttgtcagaaatagtgttaagcaaatcgagaatcaggaagggaacgtcagcgtttgacattgcccatgacatacccatcgaagaaccaattaataacaagacaattgcagtggtaataacggattccagaaatattttaggtaaatctttaactgagatttcacgataaagaaccagtgcaaggaaaagggtataaattactgcaattgcggaggcctctgtcggggtaaaaataccacttaatacaccccccataattaaaataatcaggaaaatactggggatagccatccatatcgcaacgccagcctggcgtaaagtcgggcgttctggctttggataaccgcgacgtaccgcgataataccggctattaccatcagtgccagacccagcaaaattcccggaacataacccgccaggaacagtgcggcaatagaagtaccaccactgaccagtgaatagacgattaacgtattacttggtggaataagcaaacccgtcggggcagaggcaacgttaaccgcagtactgaatgccgggtcgtaaccctctttaacctgttgcggatgcatgacgccgcccatcgcagccgccgaagccacggctgaaccagaaattgccccgaacagcatattggcgagaatattacagtgggcaagtgagcctggcagacgaccgccgagaatacgggcaaagttgattaatcgtcgcgctattcctccatggttcataatgttgccagacaagataaaaaatgggattgccaacaacgtaaaactatctaacccggaggctaacttttgggaaaccacactcaatgctgagttgaaatcgagttgtgtggaaattgatgccagtgtcgataaaccaatggcataaacaataggtacacctaatgccaacataaaaaagaaggcaccaaataacacaataatcggtaaccagtaatccataatttctccattcctactatggttggttgttgtttgttatctttagagtggttgtttaagttcggttaaaaccatatctatggtgtatataataataagtacaccactaatcgggatgctcatatagatatatcccatttgccagcctaaagcgggcgaggtctgacctgaatcgaatgtatccatcgttaatagcccaccaccatataccataatgatggttgcgaagataataacgataatctgaatacacaaaaataaatgacgtcgggcttttcctttcagcatcataggtagcaggtcaatcgccagatgccggttttgccctgcggtgtatgccccaccaaaaagtccaagacaaataaagagcaaacggctgagttcatctgtaaaaatactgggactagtaaatataaatcgtgcagccacctgccacgtcacacatgccacgatgatcgccaaaatggtaatgttcaatgctgcaagcagagcattaatagatctaattatatttcgcatagtgattaacctttgcaatatcattcatcctgtggctggtaaattgtcccattaagaaaaccaggccagtttttttcaaaccaaatacctcggataataggaaactcacgaacaggtgtttctctgacgtgaaagataccgttgcaataatgaataagtagtttatcttttttatcctcagtacgctctgaacgaaagcgccaggcatcacaaaaaccatttcgtgtttgcggaatagaatttccatccctgtcgagaataatacgtgctccccgactaccaccacctgcgtcaatataatgcgttaattgcgttaatacggcggcagaagtcagtgccatatgccgccacataaacagctcggcaacttcacccacatgtttgatagccaatccatgccgttggacaaattcgctcaatagcagggcatcgcgagtggcgcgtcggactttatcggcatggcaaataaatcccgcatggtcagacattcgtgcctgaattttttctctcacaaccgacaacggcatcccggtcccgttatcgtgcgcctgagtaatgatctctcttatagaagccagtgtaggagctaccagctgtgctatatctccatcaatattccgcttttgcgtgcaaccaataaaacgtgccagacgaacagcaaaaacctgcccggcattcaatgctgcaccaccaaggcgagtgacgccgtgtgtgccagcaacttcccccacggcgaaacagccgggcagggaggtttgtccccagatatccacttcaatgccgccattcatatgctgattattcatggcaaactgcaaaggctgtgtggtgagatcgtaaccgtgcatcttatacagcgagatagacagcggattcattcgttgcagccgttcgatgggcgatggtgccagagcgtcgttattttccagatacgcgcgaacgtcgtcgtccagtcgatctaatgagaacggcaggtcacccggcaccgcttcaggattgcgattgaaatccataaatacctgacgccctgattgctgctcttgcgctactgccatatctaacaagctggagccaaaatccatcacccgagtggcgtggaacggccactgatagcctttacggaaaatgtttgaagccagctcctgggtggtgcgatagtaatccgcgaggaagttatactcgttaccctcagcatccacggaatagatatacgggatcacctgtacataggtgccggataaattccacggaaacgtgctacgcggcgtgcctataccaaactggctttcggtcagattggttagcgtcaggccttcctccagcgccagccccagcgagccaaaacatttgtgtgggtacacactgtcgcgataaagctcgccaggccctcctgttgccagtaccacattgggcgcagtcacaattgccagcccccaagggttatgggcgcgatgaccggtcgcgaggattgcccccgcaacacggtcttcgccgttttcgtcacgctgatgcagcagtttaatcactgttgcactggtcaacactggaatggcgaggcgctgtacttcttccaacagcactttcaccattaaccttgaggtacgcggcccacacgaggttgcacgcccggcttcgtcatggtcggtttgataacgaagaatcgcgccatagcgatcttccggtaattccagaccaagatattgcaacccgccaagagtgtgcagagaacctaccgcttcgacataagcggtgtcgtgatccatcgccccaccgctcgccagtgcctctgccagtttggtgaagttgtcgccgttgcccgcggtagcggcggtaaacagtgtctgtttatcggaaccagaacatgccgacgtccccatatataacccggcggtggcgatcagcacattttgctggcggcgtttaagttccacagctgcacgcagcccggctgcaccactgccgactaccagggcatctgtttgccagagtgggtaatcaacaccgtctaccgtgacaacccatgcgggctctgcctgtgcaaaaccctttgggaaagtaacgtgcgtcagcgcatcaaggatggtgtcatcaagctgactcatgcatcctccatcggcgtaaacaggctactttccatcaggcgtgggtgcttgataattggacggaaagccatatacggcagaatgtcgcgctcaatctccacacccggcgcgatttcaattaattcaacgccttctgccgttaactggaatactgcgcgttcagtgatatacaacacttcctgaccactttgctgtgcgtaggcggcgctaaaagtgattttttccaccttggtaaccagtttagggatttgacctgactgggcgatatgcaagccatctggtgttatatcgatcttgctgcctttagcgtcgaacgtgccgcagaacaccactttacgggcattttgcgcaatttcgagaaatccgccggggccaatcagattgccattgagatgggagacgttgacgttaccgtactgatccatctctcccatgccgaggaaggtgatatcgatccctccgccactgtagaactcaaattgatcgagtgatggaataatggcatcggcgttgcgggcgcagccgaaaaacgcatcatccagcatcatgccgttatgtacgccttgctcgacgctcagccataaactttggtaaggaacgccttcgcgcagcgctactcctggaatgccgccgggaataccaaagccaaagttggttgaagcgccagctaccagttcgcgtgctgcccgacgggcaatcaggcgacgtaccggatgactaaccagttcaatagcgtcgttagaactcagacggcgatgttggccgctgatggtcaggtcgtaaccgccaagataggtttgtggttgttcgcggtgttcaacgatgccatcaaccagaatgcccggtaatttgacccggcgtggttcaatcgcgccagcttccagcacatcgcgtacctgtacgaacactttgccgccgctgttgtgtgctgccagcgccatggaatagctatccatatcaatcgcttcttcttcaaggctgacgttgcctcgaggatcggcataagtgccacgcaaaatcgcgtaatccactttgaaagggcgataacgaagtttggtttcaccgtcgatttcaatcagttctaccagctcgtcggtagtgcattcattcgacttaccgccgccattgcgtggatcaacaaacgatcccagcccaacgtgggtaaaaagccccggacgtccggcgccgatctcccgtagcagtgcctgaatcacgccaccaggaaagcagtaggcttcaatcgtgttattttttaccagcgcctgcattttgggcgaccaggtaaagtgcccggcaataatgcgtttgagcatctctgcgtgcgcaaaacgattagtgcctttgcagtcgcgatcgccaatacccagcgagtggattagcgtcaggtcgcgagggtgtccggtttgcaggaaacgcgcttcaatagcagccagaatatggtcggcttccaccataccgccgccgttaccgctaatagcaatagtcgcaccgtcctgaatttgcgccgccagtgcctcggcggttgttatcttacgcatacaatttccttattgattatggaagctcacgctacttttttcggcaaaggcgcgcgtcgcctgctggcaatcctgagtggcagacattaatccggccagtagctggtgcgggtaatcggcatgtttattttccagtgccagaatcagttgcttaatatgcgccagtgccaccgggccgcatttttccagctgcgctaactggttcgccatccagctttccacctgttctttttctaccacttcatcaattaaattcgccgcctgggcttcctgcgccgtcaggcgtttacccagcatcagcatctggcgaccgaccaccggaccaacctgattaagcacacgttcaatgcccatccagccaggcaccatgccgagcatcacttccgggttagagaatttcgcgccggggcgggcaatacgaatatcgcagcacaaggccagttcaataccaccgccgatggtatgaccgttgagattcgcaacggttaattggggtaagtttcgcaggcgattaaaaacgtcattaccgcgtttaatccattttctgcccatatctaatggcgaataggccgaccacgatttaatatcgccgcccgcacaaaagaatttatcgccggttgccgttaattcgactaatcgtaatgtggtgtcgttttcaatttcatttaaataatggtcgagagattcgatcatctcttcgttaatagcatgacatttatcttcacggttcaatgtcaggcggcaggaagccgccgctctgctgaacagaacgggttggtcactcatgatcattccttaacaataatgcgcgatgcgatcgacgctaatatccagcgtgctgttaatatctttttgccaccagtacggcgagaatatttccagttcaatagcgccattaaatccggcgttttcaaccagccgacgaattgacggaatattgatgacgccatctcccggcataccacggtcattgaccagatcagtggtcggcactaaccagtcggaaacatgaaacgcgaggatgcgttttccggcacgcaggatctgactggcgagatccggatcccaccagacgtgataaacatccaccgccacgccgaggccaaactcaccatcgggatcgagttcatcacaccagtccagcgcctggcgtaacgtgcacaggcaagagcgatcggcagctgtcatcgggtgcagtggctccagcgcaattggcacgccgacatctttcgaatgtggcagcaactggcgaatcccttgtttcacttgttctcgcgcttcatatagatctttagtgcccgttggcagaccgccaaccacctgcatataacaggcggcgttaagcaccgctgcgtcgtccagcgcccggcggttatcatcaatcgccagtttgcgttccgccagtgtcggcgcggtgtagtaagtgctacggcacaaaccggaaacgctcatgttactggcggcaagctggtgggcgatttgctggagatcttcaccttgcaactccctgcgccagggagcaatcgcgccaataccacgcgcggcgcaggcatcaataatggcgggtagcggcgttttatagcccagtgttgcggtattgatactgaataaatccgggcgttgtaacagatctctcatgattcagcctcagaagcgcggcatacttaagccgccgtcgatggcgaccgcctgaccacaggtgtaaatcagtttaccttccgccatcgcgcggacagtggaagcaatatcagccggataaccccaacgtccccacggcaccagacctttggcaatcagttcgtcgtaataagccgttgccggaatagtcatatcagttttgatgagacctgggcgcacttcataaacgccaatttgttcattacaaaggcgagctgcaaatagacgagcagcggcagaaacggcggttttggcaatggtgtattcgccgcgattcatcgccagcatgatggcgttgatggaactgacgaaaataatcgagcggtgcggcagttccgcttccggtttcggctgtgccagtaaacgcttactgaatgcctgagcaaggaagaacggcgcgcgggtgttaatggcaatgttttgatcgaagctgtctggttcgaggtcgaggaggtcaccgcgttttttcactgaaatgcctgcgttgttgagcaggcagtccagacgtccccacaggttttgcgccgcgtcgagcatctcttcatgcaaggagagatcgccgacatcggcagggaagcaaatcacttccacgccttcagctatacattcttgttgtgtgatatgcagtttttctacgctgtcggcatcgggaagatcgttaatcagcaggttaaatccgccacgagcaagctccagcgcacagccctttccaataccacgagcggctccggtaatcacggcaacaggacgagtggatttcatacaatagctctctttttttgaatattgttttctaagtgacaattagcttgcgacgtgccgcaagaaagatcaaccatctggttggttgatatgcgatagtgatcacaggacatttgataacttgatgaaagtacaagtttttatcctttttactggagcttctaattaatcgggttaagatagttatcttgaagaggtcgtggggaagcgttatgtatcttgataccagcaacgtacagagcctgaaggaaaagctgctgttatgcgcggttaatgaatttgccgaatatggttatgaaggggccagggtcgataatattgttaaggctgcggggtgtagtaaacagacggtttatcatcactttggtaataaagaaaatttatttattgaagtactggaatatacctggaacgatattcgacaaaaagaaaaggcccttgatttctcagatcttccgccacaaaaagccattgagaaaattattgattttacatgggattattatattgctaatccctggtttttaaaaattgtgcatagtgaaaatcaaagtaaaggtgtgcattatgcaaaatcacagcgtctcttagaaattaaccatgcgcacttgcagttaatggaatccttattggatgaagggaagaaacacaatatttttaagccagatatcgacccattgcaggtgaatattaatattgctgcgcttggcggatattatttgatcaaccagcatacgcttggcctggtttatcatatcagtatggtttccccccaggcactggaagccagacgtaaggtcatcaaagagacaatccttagctggcttttggttgacccttcatctaccgcgcacgaataaaactgccatccggctggcgggtgaacaggacctgttgattattccccgtatcaatggttaagcccgtcaccacgccgctggcgttctggcggattttcaccatttgcccgttttgcaaattactcagcggcttacccgcgccttctacctgcgccattgcatagacatcggtagcgggcagtccgtggtcgcggaacagctgcgccatcgttttaccgggttcgacacggtaagagcgccattgattatcaattccgctatctggctggaatggttgtgtttgggtagtttgcggctgttcttctggctggccttcctgtataggttctggagcgaccggagccacctgatcaggatcattttgtggtgtgactaattgcgcccgcagctgttcttctgtcggcggttgtgattgcgactgaatatctaactgcgcttcacgcgtcaccaccggcgcgttgggcgtatcatcagatggaagcagaaatccgaccaccaatataatggcggcaataatgatcccccgacgatgcatcggcggcagcgggtccatgaagcgaaaattgtccggcgcgtgccagactttctccagggttggttttagttcaaagcgcccgggcatggtttcctcctgctccgcgtcttgttcctcaatcatagcctatgaataagctaacgctatgatgtccgtggtaaacccgcctttattatattcatacgggatattgctattgtttctttttccccgggatttgtcatcattcctgcgacaaagttttacccaaagaagtgtggctgatatgctgcccgctacttttataccctaagaaaggaaatacgatgaccaccccaacttttgacaccatcgaagcgcaagcaagctacggcattggtttacaggtaggccaacaactgagtgaatctggcctgcaagggctgctgccggaggcgctggtggctggtattgcagatgcgctggaaggcaaacatccggctgttccggttgatgtggtgcatcgcgcgctgcgtgaaatccacgaacgcgccgatgccgttcgtcgtcagcgtttccaggcgatggctgccgaaggtgtgaaatatcttgaagaaaatgccaaaaaagaaggtgtgaacagcaccgaatctggcctgcaattccgcgtgatcaaccagggtgaaggcgcaattccggcacgtactgaccgcgttcgtgttcattacaccggtaaactgatcgacggcaccgtgtttgacagctccgttgctcgtggtgaacccgctgaattcccggttaatggcgtgatccctggctggattgaagcactgactctgatgccggtaggttctaaatgggaactgactatcccgcaggaactggcatatggcgagcgcggcgcaggcgcatccatccctccgttcagcaccctggtgtttgaagtcgaactgctggaaatcctctaagcagcgcattctgttcccctcgaaccagaggggagcaggcattcagcaataaacccttcagtttgccaaacggcgctattttgtgttgcaaagaccccgtaagcgtgtatttttgtgagctgtttcgcgttatcaccgtgatatgacactcactttaaacataaaattaacattagatctaaatcttagtattcatcccgcgtattgttacctaatatcgatgagtcccgatacagattcgtcgtatcatagactgactaaaggccgtagagcctgaacaacacagacaggtacaggaagaaaaaaacatggtagatcaggtaaaagtcgttgccgatgatcaggctccggctgaacagtcgctacggcgcaatctcacaaaccgacatattcagcttattgccattggcggtgccattggtacggggttgtttatggggtctggcaaaacgattagccttgccgggccgtcgatcattttcgtttatatgatcatcggttttatgctctttttcgtgatgcgggcaatgggggaattgctgctttcgaatctggaatacaaatcttttagtgacttcgcttccgatttactcgggccgtgggcaggatatttcaccggctggacttactggttctgctgggttgtaaccggtatggcagacgtggtggcgatcactgcttatgctcagttctggttccccgatctctccgactgggtcgcctcgctggcggtgatagtgctgctgttgacgctcaaccttgccaccgtgaaaatgttcggtgagatggagttctggtttgcgatgatcaaaatcgtcgccatcgtgtcgctgattgtcgtcggcctggtcatggtggcgatgcactttcagtcaccgaccggtgtggaagcgtcattcgcgcatttgtggaatgacggcggctggttcccgaaaggtttaagtggcttctttgccggattccagatagcggttttcgctttcgtggggattgagctggtaggtacaacagctgcggaaaccaaagatccggagaaatcactgccacgcgcgattaactccattccgatccgtatcattatgttctacgtcttcgcgctgattgtgattatgtccgtgacgccgtggagttcggtagtcccggagaaaagcccgtttgttgaactgttcgtgttggtagggctgcctgctgccgcaagcgtgatcaactttgtggtgctgacctctgcggcgtcttccgctaacagcggcgtcttctctaccagccgtatgctgtttggtctggcgcaggaaggtgtggcaccgaaagcgttcgctaaactttctaagcgcgcagtaccagcgaaagggctgaccttctcctgcatctgcctgctcggtggcgtggtgatgctgtatgtgaatcctagcgtgattggcgcgttcacgatgattacaaccgtttccgcgattctgtttatgttcgtctggacgattatcctttgctcgtacctggtttaccgcaaacagcgtcctcatctgcatgagaagtcgatctacaagatgccgctcggcaagctgatgtgctgggtatgtatggcgttctttgtgttcgtggtcgtgttgctgacactggaagatgacactcgccaggcgctgttggtcaccccgctgtggtttatcgcactggggctgggctggttgtttattggtaagaagcgggctgctgaactgcggaaataaccgcattatcatgctggatggcgcaatgccatccagcttttagattactcacccgccagcgcgcgtgggaacagtacattgttttccagactgatgtgatccatcaggtcatcaatcagttcattaatgccgttatacatcgctttccaggtggtgcaggcttctggcggcggtgtgacgttattggtagtgtgtttgatcacttccagcagttcgcccgcttcatcgtgctcgctttccattacgctgattggccccattgcctggctgcccatgccttgtttgatcatcgggaagaggatctgctcttctttcatcatgtggctggaaagctcttcatgcagcatggtcaggtattttgtcagcccttttggcacgctcggtttgtcggcgtgaacgcgctcgactttagtcgcttgcaggatcagctccggcagttgctcgcggtgacgatcgtggtagcgcacgatgatatggtcgatgatttctgccagcggggcgctacgccagtctttctcaatcggttgttcagcaagctttgccagctcagcttcaatgacctcaacatccagttctttacgtgccgccgcacgcgccagcgtttgcttaccgccgcagcagtaatccatatcatatttacgaaacagagccgaagcgcgagggatagagagcgccagttcacctaaaggttggtcgcgataagccatagctgatacctcattcttaataagataagatgtattttaaatgcatctttaaggcaaatgctataacccttacgtagcagaggcttatttaactcactgccagtatgtcaactttctgagacagattcagttaaaggcttttccggttttgctctgactgcaatgaccacgccaaccactaacagcgcgataccgctcagcgtcatcagcggcggcatttgctggcgtatcaaaaaggtgtacagcaaacctgccagtgtttcgaaaacgatcagcggcccgagaatcactgtcggtaatcgctggctggcgacgttccagcagagtgcgccaacccatgagcaaagcacggctatcgcaaccatcagactaataaacaccagcggacgggggccaaaaggtaaggagaagtccggcgtttgtatattcagccagtaacaggcgacgagatagccgatgagagaaaccggcagcgtgaccagcgcctgcgccgtcgcccacatcatcggatgtttgtcgggattttcccgcagccagcgggcgttgcgcagggcataccatgcccagcagaccacggaaactaacgctagcacgatgccagaggtataacgtgcccagtcaaaatcggggagtccgtggtttaactcagcaatattcacacacgccaggccgatgccaatacaaatcagtgccggggcgagttttccccacgcgagtttgccgtcgcgctggctataaagcagattggcaaagacaggaatgaccaccggcagggtgccaataatcatcgtagaaacaggcgcgccagtacgttgaatggcactggcaaggcagaagtaatagatgaggttgcccatcatagtgagcatcaaggcggtaagccagtcgcgacgcgccaactgacgcagacgcacgcgtcccagccaggcaatgggtagcgcaattaaccctaacgccagataacgccccatcgactgcaacatcgccgggtattccggcacgatcaacggcccgacaaaaataagcccccacatcaaccctgctaacagggcgtacagcacgccgctaatcattactggcatccattggtctgtcagaagaaacgttcaggaagcagacatgattgctcccggcatcccgtcattatcagagaggatgcgggaggatgccactttaattaactatttattaacattaaaaagatggcttacgctttcggctaacgttgtcgttgggcggccaatcaatttgctcagcgttttgctgtcatcaaacagaccgcctttcgatgcgccaacgtcagaatccgccagcatatccgccagtccgtcaggcaggccaacgcttttcagcgccgcagcgaaatcggtttcgctcagattttgataggtaacctgtttgccgctctgtttggtcagctctgccgctaactgtgtcaacgtccaggcactatcgcccgccagctcgtaaaccttgccttcgtgaccggcttcgctaatcacgcgtgccgcagctgccgcataatctgcccgcgttgccgaggcaattttgccatcgcccgcggcaccgataaatacgccgtgctccagtgctgccggggcgctggcgagatagttttcggtgtaccagccgttgcgcagcagggtgtaaacgatgccagaatcagccaacattttctccgtctcgatgtgctcatcggcgaggccgagcggagatttatccgcgtgaagcagactggtataagcgataaatttcacgccagccgtctttgcggcattaataacattacgatgctgcggggcacgttgacccacttcgctggaagagatcagcagtagtttttccactccctgaagtgcagatgtcagtgcggcttcatcgccgtagtcagcctgacgcacggtaatgccttgtgctgtcagtgcctgggcttttgccggattacgaacgatagccactatttggctggcaggaaccgttttcatcaaggatttaataacatagtgaccaagttggccagtggcaccagtaatagcgatcatgggaagtctccatcgttttgtcttgtgtttaaatacgctaacacctaaacttacttttagtaagtacgtacaaaaaggtaagtatgaaatgagtcaggttagcctgtcacaacaactgaaagagggtaatctctttgcggaacagtgcccgtcgcgcgaggtgttgaaacacgtcaccagccgttggggggtgttgattctggtggcgctacgcgaaggtactcatcgctttagcgacctgcggcgcaaaatcggtggggtgagtgaaaagatgcttgcgcagtcgttacaggcgttagaacaggatggttttcttaaccgtatcgcgtatccggtggtgccgccgcatgtggaatatagcctcacgccgctgggcgagcaggtgagcgaaaaggttgctgcactggcggactggattgagttgaatttgcccgaggtgttggcggtgcgggatgaacgtgcggcataactgccggctgcgcttatccggcctacggttcatgacttgtagggcggataagatgcgccagcatcgcatccgacaaaagtgccggatgcggttgatgatttataggccgaaaaagaagtgtattacttactcaaatccacctgataaatcgcaaacccgatatcatcggtcgcgactttattcatcggatattgccctttctctttaataaacgccgcggctttatctgatggagaggtttcgaaacggatatccagtttcttatcgccagctatcggtgctaaacgccagttgttatctgccgccgggtgaatttcccccgcacgtttcgactcatcagcaatccacgctgccagcaccgagcggttctcatccggtgaagcaaaagcgatatggctgtcgcccgtaccggcaaatttgccgccgtaagcgcgatagttattggtggcaaccaggaacatggcgttcggatcaatcggcttgccattaaaggtcaggttcttaatcctttccgcattggcattaaccatctggcactcgccgtcataacgggcaggctgggtaacatcaatctgataattcacaccatcaatcacatcaaagttataggtgcggaaaccatcccagttgatgagtgactgtggtttcgtgttgtcaggatcaatctggttaaactgtccggcggagcactccagccactctttcacctctttaccgctggctttcaccacaatcagcgtattggggtagagataaagatcggcggcattacggaaggtcaactggcctttttccacctccacatagcttgccggatcatttttgcgaccaccaactttaaacggtgcagcagctgaaagcaccggcagttttgccagatccggatcgccctgaatgtaatgctcgacatacgctttttgcgcgttgttcaccacctgcacggtcggatcgtcctgcaccagcgccagatagctatacatattgtcggcggatttaccgattggcttgctgacgaactggcgtgtggcatcgtgatcggctttgagtgtttctaccagcttgctgtcttccgccgcgagggattttttattggcgatgtcgtaaatcggccgtgcttccgctttcgcctgcgtcacctgccatttaccgctgttattactgagttgtaagtcgaccaccccaagatgatcgccccacatgcccggcattaccgccggaacaccattcagcgtgcctttcgcgatatcagccccttcgatatcagcaaaatctttacctgggaaaacggcgtgagcatggccaaacataatggcgttaacgccaggaatttcactgaggtaataaactgagttttccgccatcactttatacggatcggcagatagcccggaatgcgccagaacgacaacgacatcggcacctttctcgcgcatttcaggcacgtatttgcgcacggtttcggtaatatcattcaccgtcacttttccggataaattagctttatcccagcccatgatttgcggcggcacgacgccaatatagccaatcttcagcgtctgtttttttccgtctttatcgaccacttcggtatctttaattaaatacggtgtaaacattggctgtttggttctggcgtcaatgacgttggcatttacataagggaatttcgctcccgccaacgcatttttcaggtaatccagaccgtagttaaattcatgattgccgagtgtaccgaccgtataatccagcgtattcagcgccttataaaccggatgaacatcacctgcttttaatcctttcgccgatatgtaatcggccagcggactcccctgaatcaaatcgccgttatcgaccagtacgctgtttttcacttcattgcgggcatcgttaatcaggcttgccgtacgtaccagtccgaatttttccgtggcggtgtctttgtaataatcgaaatccatcatgttgctatgcagatcagtggtttccatgatacgtagatcgaccgtcgctgcattcacactggcggcaatcagcgtggccaggagcgttgcgctaaacttaatcatcagggacatccttttatcatcgggaatacgaaagaaaagggagaataaacgccttacttatagaacagtgaagaatgccacaattttacgctttgaaaatgatgacactatcacagttggcgcattcattaacgatagggtataagtaaaacaataagttaacaccgctcacagagacgaggtggagaaatgttagatcaagtatgccagcttgcacggaatgcaggcgatgccattatgcaggtctacgacgggacgaaaccgatggacgtcgtcagcaaagcggacaattctccggtaacggcagcggatattgccgctcacaccgttatcatggacggtttacgtacgctgacaccggatattccggtcctttctgaagaagatcctcccggttgggaagtccgtcagcactggcagcgttactggctggtagacccgctggatggtactaaagagtttattaaacgtaatggcgaattcaccgttaacattgcgctcattgaccatggcaaaccgattttaggtgtggtgtatgcgccggtaatgaacataatgtacagcgcggcagaaggcaaggcctggaaagaagagtgcggtgtgcgcaagcagattcaggtccgcgatgcgcgcccgccgctggtggttatcagccgttcccatgcagatgcggagctgaatgagtatctgcaacagcttggcgaacatcagaccacgtccatcggctcttcgctgaaattctgcctggtggcggaagggcaggcgcagctgtacccgcgcttcggaccaacgaatatttgggataccgccgctggtcatgctgtggctgcagctgccggagcgcacgttcatgactggcagggtaaaccgctggattacactccgcgcgagtcgttcctgaatccgggattcagagtgtctatttattaattaatttatgcagcaggtccatcacttgctgcacctcttcctgtgtgagcgccccgtctttggcccattgcacgcgaccatccttatccagcaccactacagcggaactttcttcatccagctgccaggcaccgcgcgcgacgccattgctatcgacaataaactgcgaccagggataaagctttttattactctccagactgctgcgcacaaacatccctgaacccggaatcgcgtcgtcggtgttaacaatggtggtggtctggtagcgatcgtgcggtaacttcgctgatttaatcgcttcaatcagcgtcgcgtttttctcttttgcagaggtgcgaccagcaatatgttgcagtactcgcacttttcccactaactgtgcgctgttccaggttttgtagctaaactgatctttatcaagcaccaactcgcctcgatcggtaatgccaatcggcggcactcgctgaccggtttcgaactgatgtgcggaagccatcatcggcaacagcaggcaggtgagtgccagaatcttgcgtagggtcatggtgtttccttcttatgatatgcaggtgatccgaccacttgggtctgagttttaatcatatgtgctatttatcgaatttcccgcaagtgtgatgccagtttgcggtcaagcgcacaaatcatatgaaaaatgaatgcttatactgaagaccgcgcttcggtaaaaagataattctgaataattgtaacctttaggtaaaaaaagttatacgcggtggaaacattgcccggatagtctatagtcactaagcattaaaatttgcgcctcataatagttgggccgattgtggcaccgcacaggcgtaatactcagcaggagataacaatgaaaattttccaacggtacaacccacttcaggtggcgaagtacgtaaagatcctgttccgtggacggttatacatcaaggacgttggcgcttttgaatttgataagggtaagattcttatcccaaaagtgaaggataagctgcatttgtcagtgatgtccgaagttaaccgtcaggttatgcgtctgcaaacagagatggcttaaccaaagtgctatgcagtaataagacggctcctgattcaggagccgttgatgtttctgggggttacgcgacgctttcttctttatctttagcgtcaggcagttttggcgaaagggcggtggccttgctgtcgatccgggtcaccagcagctggtcgatgcggtagttatcgatatccaccacttcaaatttgtagccggcgaatttcaccgaatcggtgcgtttcgggatcttacgcagcataaacatcataaagccgccgatggtttcgtagttgcccgactgcgggaactcgtcaatatccagcacgcgcatgacgtcgtcaattggggtgccgccgtcaatcagccatgagttctcatcacgggcgacaatctgctcttccagcccctgaccgactagatcgcccatcagcgtggtcatcacgtcattgagggtgatgatccccaccaccagcgcgtactcgttcatgatcaccgcgaagtcttcacctgcggttttaaaactttccaacgcctctgaaagggttaacgtatccggcacaatcagcgtgttgcgaatttgtacgccgctgttcagtgccaggctttggttagccagcacgcggttcagcaggtctttagaatcgacatagccgatgatgtggtcaatatcttcattacagacgaggaacttagagtgcggatgttccgccaccttattcttcaggctttgctcatcttcgtggagatcaaaccaaatcacgttttcacgcggtgtcattgacgacggaacggtacgggattccagctcaaagacgttttcaatcagctcgtgttcctgtttacgtaacacgcccgccagcgcaccggcttccactaccgcgtagatgtcatcagaagtgatgtcatctttacgtaccattggcagtttgaaaatacggaagattatgttcgccagtccgttgaagaaccacaccagcggggtgcaaacgtacaggcagaagcgcatcgggttgatgatacgcaaagcgacagcttctggcgcaatcataccgatgcgtttcggggttaaatccgcaaacaggataaacatgccagtcactaacgagaaagagagaataaagctcagttgctcagagagctctgccgacatatagcgggagaacaggctgtgaaaagctggagaaaatgccgcatcaccgacgataccgccgagaatcgccactgcgttcagaccgatttggaccacggtaaagaacatgccgggattttcctgcatattcagaacgcgttgggcatttatattgccttcatcagccagcagtttaagtttgattttgcgtgaggcggcaagtgagatctcggacatcgagaagaacgcacttacagcgatcaagcagagtatgactaaaatactgtttaacatatcttatccgacctttcaggccagatcctcggaaggggaagttgattaatttgtgtgaaatacaaattgaaagccgattcgaagaaagtgaaccggcattttcagtggctagtatagcgtaaggtactgtaaagtcgccagagggttaaaattcagactgctgataaatgcaatactgcctgatgcgctatgccaatcaggcctacgcagtccttgcaatatattgaatttggacgattttgtaggcctggtaaggcgtttacgccgcatctggcataaataaagcgcactttatcaacaatctacatttgtacccgtaacgctatgcttccggtggcagacagacgccaattccgccaattccacagtaaccatacgggtttttatgcagatattgctggtggtcatcttcggcataataaaacggtgtggcgttagcgatttccgtggtgatgtgacgatcatcatcggcggcaagcatcgccgcctgaaaacgttccagactggcgcgagctgcggcatcctgttctggggtcagcggataaatcgctgaacgatactgcgtgccgtggtcattgccctgacgcattccctgggcgggatcgtgattctcccaaaatacctgtagcaactgctcatagctgatgacggaaggatcgtaaacaatgcgtaccgcttcggcatgacccgtatcaccggagcacacttcccgataagtcggatttggcgtatagcctccggtatagcctgcggcggtgctgtaaacgccgggtaactgccagaacagacgctccacaccccagaaacaacccatcgcaaaaatggcaatctccattccgtcaggtacattggtcattgagtgaccgttgaccgcatgcagcgtggctacgggcatcggggtgttacgtccaggcagggcatcggcgggggaaaccagatgctttttatcaaataaactcatggtgtcgctctcccgaaaatcggtcattggggttaaggttgtaacaagaggcgtatttgcacacaataaccaccgtgaataggtctaaagtaaaacataagaaatatttggggtttagtctgctttttaatccatattactggatttttgttaagccgtttaacggcgttccaggggcaggaaaaaaggatattcaggagaaaatgtgcgctatatccgacagttatgctgtgtaagcttactctgcttaagcggatctgccgtcgccgcgaacgtccgtctacaggtcgaggggttatcgggacagctggaaaagaacgttcgtgcgcagctttctacgattgaaagtgatgaagtgacgccagaccgtcgctttcgcgcacgcgtcgatgatgccatccgcgaaggtctgaaagcgctgggttattaccagccgaccattgaatttgatctccgtccaccgccaaagaaagggcggcaggtattgatcgccaaagtcacgccaggcgtgccggtgttaattggcggcaccgatgtggtattgcgcggcggcgcgcggaccgataaagactatttgaaattgctcgatactcgcccggctattggcacggtgctgaaccagggcgattatgaaaatttcaaaaagtccttaaccagcattgcgttgcgtaaaggttatttcgatagcgaatttaccaaagcgcagctgggcattgcgctcggcctgcataaagccttctgggatattgattataacagtggcgaacgttaccgctttgggcatgtgacctttgaaggatcacaaatccgcgatgaatacctgcaaaatctggtgccgtttaaagagggcgatgagtacgaatcgaaagatctggcggaactgaaccgccgactttctgctaccggctggtttaactcggtggtggtggctccacaatttgataaagcgcgcgaaacgaaagtattaccattgacgggcgtggtttcgccgcgaacagaaaacaccatcgaaaccggggtcggttactctacggacgtgggaccgcgcgtgaaagcgacgtggaaaaaaccgtggatgaactcatacggtcacagtctgaccaccagtaccagtatttccgcgccggaacagatcctcgacttcagctataaaatgccgctgctgaagaatccactggaacaatattatttggtgcagggcggttttaagcgcactgacctgaacgataccgaatctgactccactacgctggtggcttctcgctactgggatctctccagcggctggcagcgtgccattaacctgcgctggagtctcgaccactttacccagggtgaaattaccaacaccacgatgctgttttatcctggggtgatgattagccgcacgcgttctcgtggtggcctgatgccaacctggggcgactcgcaacgctactctatcgactactccaacactgcctggggctcagatgtcgatttctccgttttccaggcacaaaacgtctggatccgcacactgtacgatcgccatcgttttgtgacacgcggcacgctgggctggattgaaaccggtgatttcgacaaagtaccgccggatctgcgttttttcgccgggggcgaccgcagtattcgtggctacaaatacaaatctatcgctccgaaatacgccaacggtgacctgaaaggggcctcgaagttgataaccggatcgctggagtaccagtacaacgtgaccggaaaatggtggggcgcggtgtttgtcgatagtggcgaagcggtaagcgatattcgccgcagcgactttaaaaccggtaccggggtcggcgtacgctgggaatcgccggtcgggccaatcaaactcgattttgccgtaccggtcgcggataaagacgaacacgggttacagttttacatcggtctggggccagaattatgagtttatggaaaaaaatcagcctcggcgtggttatcgttatcttactgttgctgggatcggtggcgtttctggtgggcaccaccagcggcctgcatctggtatttaaagcggcggatcgctgggtgccaggactggatgttggcaaggtcaccggcggctggcgcgatctcaccttgtctgacgttcgttatgagcagccaggcgtggcggtaaaagcaggcaatctgcatctggcggtcgggcttgagtgcctgtggaacagcagtgtttgtattaatgatctggcgctgaaagacatccaggtcaatatcgacagcaaaaaaatgcccccttctgaacaggttgaagaagaggaagatagcggtccgctggatctctccacgccgtatcccatcaccctaacacgggtggcactggacaacgtcaacatcaagattgatgacaccacggtatcggtgatggacttcacctccggcctgaactggcaggagaaaaccctgaccctgaaaccgacgtcgctgaaaggcctgctgattgctctgccgaaagtggcggaagtggcgcaggaagaagtggtcgaaccgaaaattgaaaatccgcagccggaggaaaagccgctcggcgaaacgctgaaagatctcttttctcgcccggtattgccggaaatgaccgacgtgcatttgccgcttaacctgaacattgaagagtttaaaggcgagcagttacgcgtgacgggcgacacggacatcaccgtgcgcaccatgctgctgaaagtgagcagcattgacggcaatactaaactggacgccctggatatcgattccagtcaagggatcgtcaacgccagcggcacggcgcagctgtcagacaactggccggtggacatcactctcaatagtacactgaacgtggagccgttgaaaggtgaaaaggtgaagctgaaagtgggcggcgcgctgcgcgaacagctggagattggcgttaatctttccggtccggtggatatggatttacgcgcccagacgcgactggcggaagccggattgccgctcaacgtggaagtgaacagcaaacagatttactggccgttcactggtgagaagcagtatcaggcggatgatctgaaactgaaacttaccggcaaaatgaccgattacacgctctctatgcgtacggcagtgaagggactggagatcccgccagccaccattacccttgatgccaaaggtaatgaacagcaggtcaatctcgacaaactcaccgtcgcggcgctggaagggaaaactgaactcaaggcgttgctcgactggcagcaggccattagttggcgcggtgagctaacgcttaacggcattaacaccgccaaagagatcccagagtggccgtcgaaactcaatggcttgattaaaacccgcggtagcctgtacggcggcacctggcagatggaggtgccagaactgaagctgaccggtaacgtcaaacagaacaaagtgaacgttgacggcacgctgaaaggcaacagttatatgcagtggatgatcccagggcttcatctggaactggggccaaacagtgccgaagtgaaaggcgagctgggggtaaaagatctcaatcttgatgccaccatcaacgcgccggggctggataacgcgctgccggggcttggcggtacagcgaaagggctggtgaaagtacgcggcacggtggaagcgccacaactactggcagatatcaccgcgcgcggcctgcgctggcaggaactttccgtggcgcaggttcgcgtggaaggcgacattaaatccaccgatcagatcgccgggaaactcgacgtacgcgttgagcaaatttcgcagccggatgtaaatatcaacctcgtcaccctgaatgccaaaggcagcgaaaaacagcacgagttacagttgcggattcagggcgagcctgtctccgggcagcttaatctggcaggaagttttgatcgcaaagaagaacgctggaagggaactcttagcaatacccgcttccagacgccggtcggcccgtggtcgctgacccgcgatattgcgctggattaccgcaataaggagcaaaaaatcagcatcgggccacactgctggcttaacccgaatgcggaactgtgcgtgccgcaaactatcgatgcgggtgccgaagggcgtgcggtggtgaatctcaaccgcttcgacctggccatgctgaaaccatttatgccagaaaccactcaggccagcggtatcttcacgggtaaagcggacgttgcctgggacaccaccaaagaggggctgccgcagggcagtatcaccctttcggggcgtaacgtgcaggtaacgcaaaccgtcaacgatgcggcgctgcccgtggcgtttcagacactgaatctgacggcggaattgcgtaacaaccgtgccgaattgggctggaccatccgcctgaccaataacggccagtttgatggacaggtgcaggtgaccgatccgcaaggccgccgtaatcttggtggcaacgtcaatatccgtaacttcaaccttgcgatgataaaccccatctttacccgtggggaaaaagcagcggggatggtgagtgccaacttgcgtctgggtggtgatgtgcaaagcccgcagttgtttggtcagcttcaggttacgggtgtggatatcgacggcaactttatgccgtttgatatgcaaccgagccagcttgcggtcaactttaatggtatgcgctcgacgcttgccggtacagtacggacccagcagggtgaaatctacctgaacggtgatgccgactggagccaaattgaaaactggcgggcgcgggtaacggcgaaaggcagtaaagtgcggatcaccgtgccgccgatggtacgaatggatgtatcgccagatgttgtcttcgaggctacaccaaacctgtttaccctcgatggtcgcgtggatgtcccgtgggcgcgcatcgtggtgcacgatctgccggaaagcgcagtaggcgtctccagcgatgtggtgatgcttaacgataacctgcaaccggaagagccgaaaacggcgtcgattccgattaacagtaacctgattgtccacgttggcaacaatgtgcgcattgacgcctttggcctgaaagcgcggctgacgggcgatcttaacgtcgttcaggacaaacaagggctgggcctgaacgggcagatcaacatccctgaagggcgcttccatgcctatggtcaggatctgattgtgcgtaaaggtgagttactgttctctggtccgccggatcaaccgtatcttaatattgaagctattcgtaacccggatgctacagaagacgacgtaatcgccggagttcgcgtcactggtctggcggacgaaccgaaagcggagatcttctctgacccggcgatgtcgcaacaagctgcattgtcttatttgctacgtggacaagggctggagagcgatcagagcgacagtgcggcaatgacctcgatgctgattggtctgggggttgcgcaaagtggccagattgtgggtaaaatcggcgagacgtttggcgtaagcaatttagcgctcgacacccagggagtaggcgactcctcccaggtagtggtcagcggctatgtattgccaggtctgcaagtgaaatacggcgtgggtatatttgactctatagcaacactcacgttacgttatcgcctgatgcctaagctatatctggaagccgtgtctggtgtagaccaggcactggatttgctctatcagttcgagttttagcaatgcgaatatttgtctacggcagtttacgccacaaacaaggcaacagtcactggatgaccaatgcccagttactgggcgatttcagtatcgataactaccagttgtatagcctgggccactatccaggcgcagttccggggaacggaacagtacacggtgaagtttatcgtattgacaacgccacgctggccgaacttgatgccttgcgcaccaggggcggtgaatacgcgcgccagttgattcagacgccgtacgggagtgcatggatgtacgtttatcaacgacccgtcgatggattaaagctaattgaaagcggcgactggttagacagggataagtaataataaaagcacgccaccttcgggtggcacgaaaactgctgtaatgcaatgaaaaataatggattatttttcgcattgtccacatattgccatggtgaactaaagcccgcgccgtgatgtgcgggctgttttaggggcgtttattactgtcttttttattaaaggagctcaggtaatgtatacctataaaatgattcaggtgccgcctaatatttctgtaaaagccaaggataataagtctggcgtagctgctgcatatcttcagggggtggtcaatgagcaggctgctgaaggttgggagtttcagcgagttgataccattggtattgaagagcagccaggatgtttcaatggcggaaaggcacaggtttttcagtactatgtgattacttttcgaaaaaaagtgcgagatgtttaaatgggttagtattcgcctgattctttattatcgcgcccatgcgccagcaagcattcgtaacagatgtcgttatactccaagctgctcggcttataccttgattgcaataaggcgctttggtttttttgaagggtggcgattaggcttgaaccggatttatcgctgtcgtccgcctaatggtggtgctgattatcccccgcatatttgtaaatgtcgcaaatcgtgagtgcgcaggaaaaagaaaacccgcagtttttacgctgcgggtttgttgttcatgtctgagagatagggtgccacttcagccaaccttagcaaccgattgacgggggattgctcccccgtcgcggtttccttactgcttacactgtaagaacgccgcaaactccgctccccaaaagctcatccgtatttcacacagcgaaccgtgcagcatccagatgatgaggattaccgtcacgcagaacgtgatggccgtaagcgatttttgcgacatagcgcttgctcctttgttggagaggcgctaacctatcacttgcttaaggtagatatgttagggcctcggttaaacagaaatgttttccggggcctttccacatctggccttcgggtattccctccgaccatcagccgaaaggcacccgcgcgtaatctatcgcttttttgttactccggcaattctgcctgttaattctgaggtaaaggcaaactcatctgattgtttcccctgtgtgaagctggcagatcatgccatgggataccttctgatgagtgaacgccggaggcgtgtttcgatgtaaatttatggaaagcttccagtgttgagaagcatacgccgcattccaggttgttacactggtaatacttttgccgcacggtgtttgaatcattttccggacgactggtgcggatacgggcagatgcgccacaaagcggacaacggaacatagcgacctcccttaacgtggtgctgtcgctattctaagttcctcactctgtttccgctatccattccgggatttttgcctcaagctcaagctgtgtggtaaagccactgttatcaatggtgtgctcggcttttgcaataatccagtcctgattatcaatctcgcttttaaatcctgttaccgtgccatgcatttcggggtagagttctgcgcgtccacgtgccagtgtgatggagaatgatgcggctccgcgttgtagctgctgccactttgccgccgctgcgcgtcttgctgcctgctcgttctgataagtcttgcgtaacacaaacacgttgccttccgcaccttccatatagtcaccttcacggctgctgcttttctcttttttcggtttgcggcgtttcacgctgacttttttctttttcccgtaattaagatcaagccagtaggcgcgtacacccgtatacgcctcgcggtcagcaatgcggaactgatggcgatcgccgctgctgcgtgtgatggcgaacgatggcaacggctggccctgtgcgttcacgccaccaccgggcatgatgaataacagattaccgctttttaccgtggtgattgcgcccagcatttccgccatgcgcgtaaggaaggacatgtcgctttcttcggtctggtcggcgtggtcgatttcgatatccatcagcatttcgctgatttgcggtttcagaccataccgatgagcgatggcggataccacacgctcaacggtcacatcatgccaggacacctcacgtttaacgttaaattcatcccgaaaatctgcgcttctggctgaaacagtcagcctgtccggcggtccttcgtgagcgatttcatcaacaatgtaagtgcctttttctgtcagcggttctcctttccagccaatgagaaccgtcaggcgcgcgccccgtggcggtagctgcaactgaccatccgcatcatccagcgtgatggtgagctggtccgcttcaaatccccggttgtcggtcagtgacaggctcatcaggcgctctgccacgcctgacagcgttttaccctccgcgagaatatcaaaatccggcattttcacggggtctgtgccctgactgagcaattgcatggtggtatcggtcatctgttccctccctgtgcggcatggtcgcatgtgcgtgcggagggggttactgctttttgttgtcgccgtggcgggagaacggcgcaggggtgagattacgcgcgtggtgggtgatgattgttgccgaatcatttaacggatacaaggggctgaagctatgagtgaaactcgttttcatggtgcccgtgttacggaaaataccgacctggtaacagcgattaacgatgttgattccagcgttatcggtatcgtggcaacggcggatgatgcggacgcgaagctgttcccgctgaacaagcccacactgctgacccgcgtcaatgacgtgctgggaaaatgcgggacaacggggacgctttatcgtgcgcttaaggccatcgcagaccaggtgagcacaaaggtgatcgtcgttcgcgtggctgaacacaaagaagaagacggaaagacgcaggatcaactggttatcggtggttctgaggatgacggcagctatacggggatgtatgcgctgcttgttgcagagcaggatgaaagcatcggataccgtccgcgtattctggccgcgccggagctggacacggaggctgtaacaaaatccctgtgcgtgattgcaggtaaactgcgcgcgtttgtgtatgcctcatgtcacggctgtaacacgatggctgaggcgattacctaccgccagaaattcaacgaacgtgaggtgatgctcttatggccggacttcatcgcctacaacccgaaaagtggcaaaaacgaaacgttccccgcgtctgcctatgcgtgcggccttcgtgcgtacattgaccatgagcagggatggcacaaatcactgtccaacgttccggttaaaaatgtgctggggatgtcgaggcatgtgttctggtcgttgcaggccgaagacagcgatgccaacagcctcaacaacaaagaaatcacgaccattattcgtcgcaacgggttccgcttctggggcaaccgcacaccggaaacgaacgcctacatctttgaggtgtatacccgaaccgcacaggtgctggctgattcaattgcggaagcgcagtttgaaaccatcgacagtccactgacgcctgcgaacgtgaaggatgttatcagtgccatcagggcaaaactggattcactggttactgccgggaaactgattggcgcggagtgctggtatgacgtggtggataacagcaccacggatttacgtcaggggcgtgtgcgtattcgctacaaatatacgcccgttccgccactggaagacatggagctttaccagacgtttactgatgaatactttgaacccgcatttgcggtgctgggaggtgcctgatggctgtgccaaaacatcttcgcttttttacgctgtttgtggatggtgaaaacgaagtgggtaaggtgacgtccgtcactttgcctaagctgacgcgcaaaaccgacagctaccggggtggtggcatgatgggggcggtaagtattgatctcggcctggacgactccgcgcttgatgcgagctttgtcatggggggcgcagttcgtgagctgttccttaagtatggcggcacgattgacggcacgctgctgcgttttgcgggtgaatactacaccgatgcagaaagcgacctgtatgaagtcgaaatgcgcggacgtgtgacggaaattgatatgggggaagccaaaacagggcgaagccacatcacacacttacgccattaaaaacacctactacaagctgagcgttaacgatcgcccgttgtgggagattgacctgctgaacttcatttaccggaaggacggcaaggacattgtgcccgatcgcatccgttccgcgcttgggcttggctgataagtaatatgcaggcggcgcagtgcgtcgcctctgactgaaaggagtttcctgatgaaagagacgaaaaacatcgataccgaaaacacggtagttactgacactgtgaaagaaaccagtgagcgtggcgtaaaacttacccaaccaattgagcgaagcggcgaaaaaatcacgtatgtggagatcaccggggctattgagcaggctggatctctgcgagatttgtcgctgtctgatgtgctgagtctgaaagcggaatccatgtttacgctgctgtcacgcgtgacatcaccgcgactggatgaagtgacgatcaaaaaaatggcatcccgtgactttattcagttatgtgtggttgccgtaaattttttgagcggtgcggactctggcgggaagaacgaacaggcgacggaagcctgatcacggttgtgtgctttgagcacatagaagactttgtggcagatattgccgttatttttaactggtcgcccgccgaaatcttcatgatgacgcccggcgaagtggttagctggcgtgagcgggcggcacttcgcagcgggaatgcagacaatgaagactcttgatatccgggtcgctttcagcgccgttgacaggctgacccgacctgccgaaaacgcacgccgcctgatggggcagtttggtgactccatccagcgaacgcagggggcgatcaaaaatctcgagcgtcaggcgcgttcatttgagcgcgcccgcgacgctgtcagtaaagcggatgcgggtatcgtgaaagcacgacgccagcttaacgcccttaatcagttacaacgcacgggtacagtgctcagcgaaaaacaacaaaagctgatgcagcagttaagcacccggcttgaacgcctgaatgaatcgcgcacacgggaaattcagaaaatgcgggagcttggcggagagctgaaacgccacggcatttccctgacaggcagcgataacaccatccagcaggccatcagacgcaccgaacagtacaacaaccagcttgaacgcgaacggcaggcgcttgcgcgtgtaacgcgggcgcgtgagcggtattcgcgcgtgcaggaaaccgcgggaaaactgaaaacaggtggtgcgctggcaattggtgcggcagcggcgggcggctatgctgccgggcgttttttgcagcctgcgatcgggttcggcaaagagatgtcccgcgttcaggcactgacgcgaatcgaccagaacagcccgcagtttaaggcgctgcgtgagcaggcgttaaaactgggctctgaaacgcagttcaccgcaggcgatgccgccagtggacaggcatttcttgcaatggctggctttacaccacaggccattcaggctgcgctccctggcgtactgagcatggcaacggctggcggtatggacctcggtgagacggcggatattggctcaaatattctgacgcagttcggtctttctgctgaccagatggaccgggtcggcgacacactcaccgcagcgtttacccgtaccaacactgaccttcgcgcactgggtgaaaccatgaaatatgcaggtccggtggcgggtaagctgggaatatcgctggagcaggccgcagcgatggcgggcgtgctggcgaatatgggtatcagggggagtgatgctggtacggcaatgcgtgccagcctggctcgtctggcatcaccgccaaaggcggcagcagaggcgctgaaagagcttggcgtgtctgtctcggatgccgggggcaaaatgcgcccgatggaggatgtgctggctgacctttataaagctacccgcaaatacggggaagttgaccgggtatcgttctttaaggacattgccggagaagaggctttcacatcatttatggccctcgttgatgcggcaggtgacggctccttacccaaactgagaaaagaacttgaaggcgcgcgcggtgaggctgaacgcacggcaaaggttatggccaacaaccttgacggcgatctgaaatcactcagcagtgcatgggaagggttgcgcatccgcattgcagatctgattgacggtccgctgcgttctgtcacgcagtggctcacgcgtgtgttatcaaaggtgacggcgctggcgcaggcccatcccgcactgacgcgccagctactgattgcaggcggcgcactgctggcaatgactgcaacggttggctcgttgtcgctggctattggtgtgcttgctggcccgctggcaaaactgcgtcttggtttttccctcctgaccggatcaatgaatgctgtcagggttctgccagcactatggggaatggtgacgggttccgtttctttactgggaggcgctatcggggcgttgttcagtccggttggtcttatcgtggctgcgcttgccggagctgccgttcttatctggaaatactgggatcccatcagggcattttttgccggggtgttcagcgggattatggaaaggctgaccccgttgcgcgaaacctttgaacggtttggtcctgtttttgacgcaatcgggagtgggatcagccaggtgtttaactggtttaaatcgctgctgtcaccgatggagtccagcaaggaaactctggataaatgtaccagtgctggcgagatattcggtaacgttcttggcggtgcgttacaacttgttctgacacctgcaaaaatgttgctggatacgctggcgtggatacttgaaaagcttggtgtgcttccggatgaagcggaaagggcgcgcaagaaaatcgaagacgcacagcgtgcggccattcttcaggacaaggttgccttgcttcagggggacctggcgaaaatcaatccaccgaagcctgtggaaaatggcaatggcaccggaggtgataaccccaaagacaataaaccgctcacagacagcaataccggtacgctgcgcagactcagcaaaattgctgataacacaggtaagctggttgaggagacgaaaaaacgcattggccccggcgatattgtctttaaaaacctgccccgagcacttgctgttcgtggggagtggcaggagcggaagattgcgcaggtcagtaagcctgcccccgcaattaatatcacacccgtggtcccggctccgctgcctccggcgctggtccctgttgttgcggccagctcccgcccggtggcggaggctatacgatctccagtggcatcagttcctgtaacttcccgtaaccgggagcctgttgcctccggatttggtggtgaaattcatgttcatctgcataacgttgttacgcagaatccccgcgaactggcgaaactggtcggtgaaatggtcagggcagaaatggaacggcgcgcccgtgccgggcgtggcagtttttacgataaagattgaggagtcatggccatgatgatgatctacggcatgtttgtttttgagctgcgcacgctgccgcatcagcagttacagcaaaacaaaagctggcggcatgtgaaaaatgaacgcgttaaccgttcagcaagctggcagtatatcggtgcaggtgatgatcgcatcgttctttctggtgtgctttatcctgaaattacaggtggcgaagtgtcgctgtcgctgctgaccacgcaggcgtatacaggacgaccctggcctttgattgatggcgtcgggcagatttacggcatgtatgtcctgactgaaacgaatacgacccgctccgagtttgatcgctacggtaaggcgaaaaagatagaattttcactgactcttgaacgctgtgatgaggatttgcgggagcgcctgcaatcctcatcgttcagtgatatgctgtccggcttcaaagataaggtgacatcatctcttaacagcgcggccagttcagttaaagggctgttctgatttaacacaaaaaccgctaatggtcagattagcggttttcattttcctgagtctgcccggttgtttcttcagtctgtatatcgcctacagggtgataacgataaatcgtcgatgtgccaatgccgtaaattattgccagttgttttctgtcgtgcccgtttttgattagccttgctatttgctcatgctgttcttttgtcagcttcggtcgacgtccgcctgtgcgcccccttgcgcgcgctgccgccagcccggccagtgtacgttcaacaattaattcacgttccatttcagccagggcacccatcacgtggaagaaaaaacgccccattggagaagatgtgtctatgctgtcggtcagactgcgaaaattaatccctcgctcccgtagttccccgacgagagaaatcagatgtttcatgcttcgcccgaggcgatccagtttccagacaaccagcgtgtcacctttttgaaggcgctttaaagcgcgttttaatcccggtcggtctgtctttgtcccgcttaatttatcttcaaatatttgttcacatcctgcacaaacaagagcgtttcgttgcaggtctgtattctggtcatttgttgatacccttacatagccaatcagcacgctgaatctcccgtccaaaagcgtaaatcatgccatgcaggtcagaaacggccattatctaaaacctcggtttacaggaaacggtaaacagggctggtaacgccgtgcaaaaaaatggcgataccttgtccggtgggcttacttttgaaaatgactcaatccttgcctggattcgaaatactgactgggcgaagattggatttaaaaatgatgccgatggtgacactgattcatacatgtggtttgaaacaggcgacaacggcaatgaatatttcaaatggagaagcaaacaaagcaccacaacaaaagacctgatgaatcttaaatgggatgctttgtatgttcttgtcaatgccattgtaaatggcgaagtcatatcaaaatcagcaaacggcctacgtattgcttatggtaattacggattctttattcgtaatgatggttcaaatacatacttcatgttgacaaactccggtgacaacatggggacttataacggattaaggccattatggattaataacgctactggcgctgtttcgatggggcgtggccttaatgtttcaggggagacactttcagaccgttttgctattaacagcagtaatggtatgtggattcagatgcgcgataacaacgctatctttgggaaaaatatagttaacactgatagcgctcaggcgttacttcgccagaatcacgccgaccgaaagttcatgataggtggactggggaacaagcaatttggcatctacatgattaataactcaaggacagccaatggcaccgatggtcaggcgtacatggataataacgggaactggctttgcggtgcgcgagttattcccggcaattatggtaattttgactcacgttatgtgagagatgtccgacttggcacacgtgttgttcagactatgcaaaaaggcgtgatgtatgagaaatcaggtcatgcaattacggggcttggcattgtcggtgaagttgatggcgatgatccggcagtattcagaccaatacaaaaatacatcaatggcacatggtataacgtcgcacaggtgtaatttatgcagcatttaaaaaatattaagtctggaaatccaaaaacaaaagaacaatatcagctaacaaagaattttgatgttatctggttatggtccgaagacggaaaaaactggtatgaggaagtgaaaaactttcagccagacacaataaagattgtttacgatgcaaataatattattgtcgccatcaccaaagatgcctccacgcttaaccctgaaggttatagcgtcgttgaggttcctgatattacagctaatcgtcgtgctgatgattccggtaagtggatgtttaaggacggagctgtggttaaacggatttatacggcagacgagcaacaacaacaggccgaatcacaaaaggctgcgttactttccgaagcagaaaacgttattcagccactggaacgcgctgtcaggctgaatatggcgacggatgaagagcgcgcacgactggagtcatgggaacgctacagcgttctggtcagccgtgtggatacaacaaagccagaatggccacaaaagcctgagtaaaaattaaggcccgatatcgggccttctctcattctggttgttcggggaacgtgactggcaggacggaggtatccgtagactctactttctgcgcgtagagcagccactcggtcaatttttgtttattctcagcagaaataattccaagtcgtagctgagaatcccatagctgagttttatccctgacgagttgtaacaggttttgcttctcattttccgcctgttgtctctgttcttcttcggtatattcccgctttatcactgcgccatctttgaacatccagttacccgaaatatcagcacggcgatttgctgtaatatcaggtaattcaacgacgcttgcgccttctggattaattgctgaaacatccttttcaatacaaataataacgccgttatggtcatagaccattttcaacgtatcagactggaaattcttttgttcctcataccagttttttccatcctctgtataaagccatttgatgttaaatcgctttgttagctggtattgctccactgttttaggattgccagcagtaatattttttaagtgcatcataattaaatactccccacgttataccaagtcccattaatgcaatactgaattggccttgcctgagttgtatcaattagttcatctctatttgagttaacggaaccggtaacaacataacctgacttatcagaccaaccaggtccattccatgtctgaacagatgataggcctcctaaacggacgcctgtaataaatcgtgaattacattctgctttggtatatgcaccaatatctcctgctgatggtttgtgagcggttgtatatagttgcgcccatccagaccaattagcatctgctgtatctcgtcgggagcgaatatatgccggagcatgaccgccgctggtcccactccacccaataaataactctccttcgccaactgccgctacaccagtaagatgaagaacgttaccataagcaaaaggatatccatttttgtacgcttcatacatttggatacctggcgtaccctttgcgctcccacttaatgctgtaacacggtttcgggatactaacgtattaatatttatatcactggaaccatcaaatttaacgccattaatatttcttgctgtttttagctttgttgcagtagcggcattgccggacagctccccagaaaggccaccgctgaatgtttgtcgattggtccaggtattcgctgtactgagtaacggtattttttccccgcttgtgccgagttctcgtaaaccgaggtattcgataacggcagcaacggtcgatttcgcaagaatatcccgcccgacttttgtcagggttgccaggctggcgacatcattccccgtaaaatacggaaacttgtctgccgcagtagcaagcccggccagcgccgtcagggtggcatctttcggttgcttacccgcaagcgcgttagtcatggtggtcgcaaaattcgggtcgtttcccagcgccgccgctaactcgttcagcgtattcagtgcgtcaggtgacgaatctacaagggcggcaatcgcagccataacgaaagccgtgcttgcgatttgggtattattcgttccctgtcgcgcagttggcgttgttggcgttccggtcaacgcaggactgtttaagggcgctttcttgttcgtttcatccattaccgccttaaccgctttcgatgtcgcggccagtgtttcagacgtgctgttggtggcactactgagctggactatccctttttgtgccgtcgtggcgtcctgagcggtatattttgcgttagcaaggtcatacgcggcctttactgctttcggcgttgcagcctgcgtttcagacgtgctgttggtggcgctactgagctggacaaggccttttcgcgctgtagtggcgtcctgtgcggtatatttcccgttagcaaggtcataggctgccttgaccgctttcggcgttgcggccagtgcttcagacgtgctgttggtggcgctactgagttgaacaaagccttttgcggtcagcgaggcgtccgggtgacgtcgtgactgttcgtgctctgagattttgtcatccacatatttgcgggttgccagaaccacagacgggtcgattttcagcgtgatggcttcggtgttcgtgacaaccagaatcatgcggatagtctgggtgcgtccactgccttcctgcaactgcggtttgtacgtttccgggcagttcgccaccgcaatgagtacgccttcatcatcataaagcccaatctcacggatccagaatcctccctcgttttcagggataatttgctccgcaataatctggctctgattgttagggtcaacgctcagaagattcagcggtgcaatgcgtttctggttaatcagttttgtctgtgccgggtctggtgtcggtaatacaccattcgcatcaccaacggccatttgcgtcagattcagcttactgccgagcatcgtcgcgttagccagtcgtgccgcgccctgattagtcagaatggcgtagtatttcactgtcatgcgtttactctcaggttatcaattaaatgaatgaccgaggccgggaaataatcccctccgacaataattgcctccggggtgtagggataaaccgtcagggcgtcaccgtgatagcatcccgtaccaacgaaaatatttccgttcacactcaggctgatcgccagccctgtcagatggcgacttactggttttgcatccgcaataaggcgctcaagttcctgatacatttcatcggtgatgccctgatcaagtactccgacaacaatgcgaaatgttcccggctcctcgttgagttgccaccactcctttacttcaatcaggtagccgagaggctctacggctcttcgcagtgcgctgatggtccctttgtgtcggtgtatcagccatgcatcacgaatcacctgtcgctttgtctcttccggccagttgcgatcccagcggtcaacggaaaatgcccaggcgagataaggcagcagatgcaccgggcatgtgtccggcgaccacagcgtgttgaggtctaccggaatgtctgtaatgcgtgttccgacggcttcggcacaacgcatgaaactgctggctgatggtggtaacagtgaattactcattgcgcccaccttcgctgatggtgaatgactcacagcgcgccgcctgtatgtcgctgatggccatattctgtgtgggttcgattatctccacgcgttgcacaccgtgcacatgcagtgcggcagcaatggcggacaacgccacgtcctgaccgataagcccctgctcagccagccacttcctgaacgacgattcagccgcagccagaataggttcggattccgggccggggtaaaagtacagttttgcattcagccgccatgtcacgatgctggcgctctgtacggtcaggcggtcggccaccgggcgggtatcctctgcattcagaacggcgcgaacggtattaagcaacgcctccgttgctgtgccgtcgccttcagtggacaggatggaaaccgtcacatttgccggagacggactgatagcccgcgcatcacgcaccagaccgctggcgctgcgggcaaaatactcgtatgcacctgacgggccagcaacactcaggccgtcatacgcccgctgcgcccgcagtctcagcgaggtgtcgctttccatcaccgcgtcggtggtatccgttgccggagtgataaccaggcgctttgtgttcatattgcccgcgaggttgtccaggtctgccccggcgctgtggcttagcatgcaggcgcgtgcaccctcattgacccgctggcgtaacagcatttcacgaaacgctgttgtctgggcgataacgttcaggggttccgattccagctccagcgcggcggaaacggcttcacgctgttcggcgggataagccgcaatcatcatggcctttgtgtcagccagaattgcctcaaagtcaggctccgcgatgatggcggggtccggtaactgtgaaaggtcaacggcgggcatgatttactccctcagcgtgatggttaattcaacattctgcatggtctgcatgacagtgcccgacagcgtcaccccggcgcggcctcccgctttccagacaacgtcgatggcatccagggcaatgcggggttcccatcgtgtcagcgcaatcacggcagcactcatgcattgcagacgcgtggtgttattcatgggttcgtcaatcaaatcaggcacaaggctgccatattcccgtcgcataacccggcttgccagtggggtggtcaggatgtccctgactgactgtttcaggtgctccatatcgttcaggtttcccgttccgtccgggttcattcctgtgtagcgggttgtcactgcgggcctcctgtcgaatcgctgccacctttcacgccaccgtgtttatgcgtatgcacggtaatgccgtttgaggtgaaatcgccgccgctgtgcgtgatattgccgctcatctttcccccttttgtgacgtcaagcgtcgccgttctcagaaggtttgtgcattccacgacgggcgtgtccagtgtcacgctgacggatgcctgtaaagtggccgttttcatgccgctggcgctcagtgcgcctgcgtccgcgtcgtagcggaacaccgcgccgtccggcgcgctgatcacgatttctttcaggcttttgccgggggccggattggcatcactccacaggctgccaattatcatggcggtttccgggttgccgccaatgcaggcaattaccacctgttcgcctggtgatggcggcagccacacattgaaggctcccgcgcgcgtggtgttccagcgcaaccagcctgtctccagttcgccgctgcgaacgcgcacgcgccaggacttctcatcaacttcagagatgatcccggtgcggatgatattgctcagcagtcgcatgagttctgcgctcaccgtacagcctccgcaatccggcccagcaccgtgttataaatcaggcgttcatctgcctgactgatgcccaacagctcacgtaccgggtaatcggtgaaaatgcccggcgcaacctgatcgcgctcaccgaactgatgaacgcgtgcaatacgtgcagccacgccgctgtaacccaccgtcacaccggaagtatccgcacgggctttcaggtagcgggcggtgcgcagttttacgaacatggggacgcgctttgtgctgtcctggttgatgcgccgggtgcgtatttccagaaagcggtcgatgtcatcccggtaaaacgtgcggatgttgtttttatcctcatcccacccggtgatggttcgcccgtatttccccgtgtcgtgatgccagtttttcagcgtgcgtgcttcgttattccagataaagcgaatgcgttcctgtatccgggttacgcggcgtctgcgtggtgcccatgcggtcccgtccggcgctttctgtgaccggatacgtgcctgctgggtgcgacgtaaatcctgtgccagctttctggcgatgttattgatggcctgctgattcaggctgtcgcggatggcctcaaaggtttcatccacgcgggtgaatgccttatccatcgctttcaccccacgtcacatcctggaatacatgcgaccagtcgccttcggaagatggcaggcggggttttggctccggcaggtgttctgcctgcggtgtgccctgactgctgcgcgtgatgcgaacgcgttcccgcaaggggagcgtaaacaggagatcggcgctgtcatcgtcattgataacggcggagaatttgatgtcctgattacgctcagggttgagcaacaactgtggctgattttgggataaccacgccagcagcggcagcgtgaggtcatccagctccccggcgtaatccatgacaaacatcaccatctgatagcggtaaacaaacgatggggtttctccggtcgtttcaatgttgccgctctccacgaaaatggtgaatttttccgggttggcctgacaccatcggcatgaacgggtcatggcttcacgcagggaatcagttttcagcatggttgttatcctcgttgttcagtcgttgcagcctgcgctgttccagtaattcaatggcccgtttatccgcgttacaggtttccagtgcatccagaaggcggtcgccccatataccgagatttccccatgtgggagtatcagggaaggggggaggcgttaccggtatggtcagcgtctgcggtataagccggactgacggcgctggccgtggcgcgttctgcgtgcctgcgcagcctgtcagtaaaacgagcgtcaggcaaagcgtgggcgcattcatcttttgcaatatcgttgcgtagctgttcacgtctgacctctccgtcctgatttcgctgttgattttccacgcggagttgcgccagtacctgctgcatatcctgcaccccggtgctgatgatattcagggtgtcgacggtacttttcagggtgctggcctgcgcttcgtttctggcgttctcccggcccagcgaccacgacagacgcatggatgttccccatccggcaatcagaaggaaagcgacgccaagcgtgggccagagcttcatgccggataggctccgtgtggtaactgaaaatgcggtccgtctttcagggtcttccagtcgccgccccattccaccggaatattcagttcccggctggcctgtctgaatgcggttgcgattttttcgtacagcggccattcccatgacacctggctgccgatataagccacaacatccacggcatgccccgtaaggtggcggctgttcatggtctggctcttacccgtggccaccagttgcttctggcggtaacggctgcgcaacccttcggtgataccaaaatccacttccgagatttccagtgcccgtcgggtcactttcaccagatcaggatttacgccctgcaaattcttttcgctccggctgctgaatttaaatgtgttgctcattcgtccttctccttcaccctgcgattaaaggccgcaataaccttgtcgcgtgctttctctgcacccataaaaccgattgatgcgccgataaacgtcacggcatcttcaggaaacccgaagaagcgcaacgacccggccacggccatggcaagaacgccgcacgccagcgatcccgttacggtctgaaccagtgttcgtccgtcataaagactcatcagcgcggaaatgctgaccgccgcgcctactgcatacaccgttggcaggtggtcaaagagccacgcaataacctgctctgtgatccctgtttgaatggtgctcactgctacttcccccacaactgaatcatttctcgtttcttcttctccggctccggcatctcaacttcctgcccggcgtccagaaatacctgctgacagagtccggggttggcatccagcaccttttcggtgacgccctgcgtcgtgccgtagtaccggaaacagagcgaatccacggtgtcgccttccagtgccttcactttcatcagcacaactccgcaaagattcgcgggcggcacagaatgtcagagatggcccagctcacatcacgccacaaatccgatgtctgtatatccagagcgtccgcccggcggtcgcccttgtccgttgtgtctgcatcacgataacgctccagaatcagggcgcgcgtggcggtataaacagcattgcgccagtgccagagattgacgctttctccgttaattacgggtgccggaacatcggccagcgtctgatggccagctgcctgctgttcctgctgccatgcttccagctcgcgggtaacgtgtgccacagccccggtggcagtatgcagcaggcgggaggtggtcacgcggcccggcagtcgtaccgccagacgcagctcgcgcagcacaatatccggccagaatgcacccgctgaaatgcgggtatcgccatcatcggtatcggtgatgtcgtcctctgcgggtctgggttcagttctggcaaccatactcatggggttcactcctgaaaaaaatcgggcggtgggtgcgcggtgtaaacggtcacggagtcaaaccggaacaccgcgcacgccgcccgctgacggggtcagtcgttaaccgcgcttcgccttctgcgtcgcggtggtttttcgtgttgcaggcttccgcgttgtctttttacttttgctgctttcgtcctgcgtctgctgtgcgctggcgtcttctggtgcggctgcggaatcggcttttttcagggcgcgggaaagggttgcaatctcgcgtttcacacctgcgttcgggttcaggtgcattgcttcgcgcagcagcttcagtgacagggccatgctgtccgtatcactcaggccacggcgggcaaaggcgcacgctttgcataatttggcgcgcacttcgtccggcatgtcctggtcggtgacaatctcccggagggtgtccagtggttcgataaaggcggacaaatccgcgtcggcatccgtcccggcctgcgtcagtaccggattacagatttcttcggtcagtaccgtggcagcagtacgtccaaagttatccggcatgatgaggttgtgacggaccacatatgcaccaatacgcagcgccagcggaagatcgccgcagtcaatcgcccagaccatcagcgtggcaatcacttcatcctgctgcccgccgtcagcctccagcgttccctcaatccagccggaaaagtccggcaataactcttttttgatggcggctttcgcgcttctggcctgtacgcccttaagccgggcctgtgccagacgcagacgatacagcacctcttcatgcgcggtacgcgcggcgtggtccacgccttcattcgcccggcctgcgcgctgtgccatcacgttctgccagtgttgctgtgcaggagtaatcattttttctctccgttacaggcgggcatgatgcccgccgtgaggtgattagctgtcggcgaacttcaggccagtgaccatcgcgcacttgccatagtcttcaacgacataagcgtcattgatggactggtaggtggcgatgcggttgtattccggctcgtctttcatcaggcgacgcattgttcctttctgccagtaaattgacaggttattgaacgaggtgatcagcatcgttgcatccgggaagaacggcgcaaggaatacatccagcccgccaatggcgcgcgatgacaggatgagctgtccggcaagtaattccgcattgggattctggccgctgatgctgttcagcacgggtagacgcagcgagttaaacaggttgcgccccataatcaccacgaggtcgtcagcttccttgtgccattcatccagcagggatgagcgcgcgtcctgtaccagagcatcagcgttcgcatatttacccgcgtgcgccacggtgttgtccatgttgcgggaggtcagcgttacatcattcataacgcgctcgctggcgtcggttctgatgtgctccagccatcccacgttaacgtcctgaagcagcttgttagtgctgaagttggactcatccgcgtgagacgtgccgttgaaaccgatcatgatgcggtcaagcgccacctgccgggcaatctgtgtgctgacgcgggactgaaaatcagggtgtgccgcccaggcatcaagctgcggatacgaaataaacgtgtcgtagttcacctgttcgcactggtatttgcggtttttcagatcaaccacgttattcgggttacggcgttttgtgccgtcataactggtattcgtgcgcgcaatcggcccggtggtgtccaggaggattttttcgcctttctggtcagtcacaccgaacacgttaattttttttgtaaattcagtgctctcctttactgcgttttcaaaacgctgctgcaccgagggttccacggtaaatcgcgataccagtgcagataccgggatattgttaagcgacgcctgctgcgccatatagcaacccagcttgttgcgggtaatatctgacatcaccagattcataaaaatttgctcctttgtcttatcagaagtcagccagctggtcggaggctgcgcccgttgcggtgaagcggttctgcggatcgccgtcctgcgtgcgcagtttttccttcagtgctgtcagctctgtggtcagtgacgtgattttctggcggtcctgctgatggcgggtttccagcacattaaaacggtcgataatgtcggcctgtgacgttgcgacgccttccaccgcttcctgaatacgggagaaactggcgtcatccgctttgcggccacgaccaataatccccattacgcggttaaaccactgggtgccttcttcctggcgttgttctgccatttcgatgatttcagactcgatggcttcggaaatgagcggtgcttcaccctggacactgttgaacgtcatcaccgcctgacgttgctgtgccgtgaatttcaggcgctcagtgcccaggcttgccggggtgtcggtcatcgccagcccgaccagataggcgcgcccgttaacggagaactgcgggtgcagttcgatactggaatagattttcttgccgtccgcgacaagctgcttcatgcgctcggtcggttcgatttctgcatacagcgcagtacgtccggccagcggaccttccgtaatgtcttccgtactcagtgcggtgacatcgcccattgcggaaaattcgcttgacgggcatggcgagagatagtgctcaacgttcacgcgggcagcgtaaacatccgggttgaagttctcggcggcttcacgcagatgcaccggactgatttcacggccatcaacagttgatccggagacagccacgcgaaactttttgcgggatgtctttttttcattagccatagtttttgcccctctgactggttcttcagtcatgatggcaaagcgtaacaggctgatacaaagggcttttgttgtaagaaaacggccagaacagggggttaaggagaacagtttcgcgcgcgggtaatcttcctgtaattactcagggggagcaatgattcaggacgcttttgtgcgccagcgtgcgcggcaactttactggcagggttatccgcccgcagaaatatcacgtctgatgggaataaacccgaacacgatttatgcgtggaaaaaacgcgaccagtgggatgaaacgccacccgtgcagcgtgtcacgcagtccatcgatgcgcgcctcatccagcttactgaaaaacagaataaaacaggcggtgactttaaggaaatagacctgctgacccggcagcttaaaaaactgcatgatggccagccggatgcgacggccacaggaaagaaaggccgggcgaaaaaactcaaaaatcatttcacgccggaacagattgccgcactgcgggaaaaaatcatcagcaggctggagtggcatcagcggggctggtttgactccctgaccctttgcagggaagccgggatacgtaacaggatgatcctgaaatcccgacagattggggcgacctggtattttgcacaggaagcactgctgatggcgctgcgtgacgatgtggcgcaaccttaccagcgtaaccagatttttttgtctgcgtcgcgtcgtcaggcgttccagtttaaaagcattattcagaaggccgcggctgaagttgatgtggagctgaaagggggcgataaaatcatcctctccaacggcgcagagctgcattttctcggcacttctgctgcgtcggcacagtcctatacgggcaatttttattttgatgaatttttctgggtcagtcgctttgctgaactgcgcaaggtggctggcgctatggcaaccctcagcggactgcggcgcacctacttctccacgccatccaccgaaacgcacgaggcatacgcctactggaacggcgaccgctggaacgagaaaaaggcctcgcataaacgccagcgtttttctgtggactggaaaacgctgcataacgggcttatctgccctgaccggacgtggcggcaaattgtcacgctggaagatgtggttaatcacggctggaaacacaccgatatcgacgaaattcgtgatgaaaacaccgaagacgagttcctcaatctctatatgtgtgagtttgtccgcgaaggggaatcggcatttaacctgaatatcctgattggctgcggtgttgacggatacgacgactggaaagactggaaaccttttgctccccgcccgatggggaatcgtccggtatggattgggtatgacgcaaacggaagcagtggcaacggcgacagcggcgctgtgtccgtggtggttcctccggctgttcctggtggccgttttcgaacggtggagacgcgacgcgttcaggggctggagtttgaagaacaggccagagtcattgaagagttcacgtgtcgctacaacgtggaacacatcggcattgatgtgacgggcgggaacggggaggctgtttatcagatagtgaaacggtttttccctgccgctattccgtacaccttcacgctgtcatcaaaacggtcgctggtactgaaaatgctgcaaataatgcgtgccgggcggtgggaatacgatcgcgccgaacgcgagctggtcgcggcctttaacgccgtgcgtaaggtgaaaacaccgggcggctttatcacttacgaaacggaccgcgcgagggggatcagccacggcgaccttgcgtgggcaaccatgcttgctgtcattaacgaaccaattggcggcgaaggagaaaacgagcgtttcacggttatggagttctgatgagcagaaaaaataaaaaagtgcgcatgagttcacgcattgatctcgctgatgcgctcaggaaagaatcatcgctcagtgcattcacatttgatggtccttatcgcctgaccgggcatgacctgctggacaatatgtactgtgctgataacgggcggtggtatgaaaccccggtggactggtacggtctggcaagagccgcccggcaaacgtcctggcatcagtctgcgctttactttaagcgcaatgtattgctcggttgctacatcccgcacccgctgctttcccggcaggatttctcggcgctggcgctggactggtttgtgttcggtaacgcattccttgagcttcgaagcaatatgctcggcgaaccgcttaaattacggcacgccctggcgaaatacatgcgacgcggaagcgatcttgaatcatggtggtatgtgcaggatggcaaggatgcgtttcagtttcgccctggcaaagtgtgccacctgatgaatccggatattaaccaggaaatctacggcatgccggaatatcttggcgcattactctcggccagcctttctcattcggcggacatgttcagaaaactgtactacgacaacggatcccacgccgggtgcatcatctacatcggtgcagcgcaggtaaaccgcgaaagcatggactccctgaaagaaacgttacagggtgcgcgtggtggtggtgcatttaaaaacgtgctcattcatgcgcccaacgggggcaaagaaggtgtgcaaattttgccgttccagcagatcaccgcaaaggatgagttcatgaatgttaaggcggcatcccgtgatgatgtactggctgcgcaccgcgttccgccgcaactgatgggggcgatgccgggtgaaaaaagtgcgtttggtgatgtggagaaggccgcgcgggtttacgcaattaacgagctgatgcccgtcatggaggccatgaagcacatcaatgactggcttggcgaagaggtgatccgctttaacccttacgcactgttagacacccagcccacatcctgacgcgcttcgcttgtctgctgcttcgccggggcataaaaaatttatgccccgactctccagctcctgtatcaatcagataatttcacgatgcttttctgctgattgccatcatcgacagtcagactcttacgcaatcccaccgcgttgactgcatgttctcgccgtctcagtgcgattttgacggccttacctaaatcaaaagccctcacgtctttttcacgctcagcgtgagaaatacagccattctgttgtatctctgcgacatcgttcagggaatgctatttaccccctgaaacgcgggctgttcccccgtcacccgcgcgcaacaaaaacgcgttttttgtgcacgcacggatccttgacggatccagccgccatgcgggccggaagggtaaaaagtcgttcaaaaaaattgtgcaaatttgtgcactattgtgcagcagggcgatgtgtgattatcgccctggtttgtcgtggatctaattatcttctgtctcctgccacgagacttttccgcctgcctttatgatggcttgctcaacatcccgttcgtatcgcaaaggctggaatacgccgttaatgaaatactcctttgggtccgggatcgatacggtaaatttgtcattctctggttttggtattggtgagactggatgctcgtttttggcaagtttttttatgactccctcgtatttttcttttgtacattgcatcgcctcttcaaaagaaagcgctttgttacgcattaacacggcgtactttagtgcatcctgtgctttctggaatttaagtgcatagtccgtggcgattttttccagttcagcagcccgccttcgaagcccttcaatctcaccattgcgggcgatgaggttgcagcacattctttcattctcatccagcaacaccagcacaaccgatggtgtcacctgttcatggaaaatatccgcatcatatccccagtcatcatgtattgcctgctctgccgcttcacgcagtgcctgatagtcaatcttgctcattggatgactcctttgtgttgcgtcagctcttcctgtgcctgcatcatgcgattgacctgaacgcgtgtgcgtcgaacggaaaaaacaaacagattcaaaaggcggcgcatctctttgtcctcatgtcgcgcatgacggataaaggtaagtcggtagaactcggattcggcagcgcgttgaatcaacgacagatcaaagtgaagtgctggtctggtgcattttgcgcatctggcggcaagctctggcatcaatctcttaacgaaggtgttttgtactgctttgttgagttgtgtctgcatccaaatcgcaaatttcagcgaacgcatgagccggatcgcgtcgggcaacggcagatagatcatgctggcggttttgggtagcggatgaatcattttcacggagacgcgatcgcgcagtgttcgaaaaatcgtgttcccgacaacagactccacggagacagggcagggggccagaccaacccgcaacgcgttcgtcatgaacagatattcatcttttttcatcgtgttttccttagtgcgggggcgacagtgcgccccgataaaattaaaagccgtcaaattcgtcattcatcttcctgctccctgcgttccttgttcttctcggataacgctgttgcacacttccacacactcgtcgcagatgaaaacgtcgtccccggcaattaactttttgatggcgtgctgtggtttcttgcagaagctgcaataaagcgtttgcctgatagatacggatgatgtgtaggatgtcagcctcgcgatgtcgttcttgcggcgcaacatcacacggcagcactcaaccagtttctccggggcgatttcttcctctgtggcgagcgcctccagtcgttcgagtatgttgaaggctttttcctcggtaattgcagaatgcgatgtggtcatctctttctccttcaaagttcagtgtgctgacagaggtgtcctttgcgacagaccaggacgcttcccttacttgagtcggtgattgtcaccgtgccgtcatcgcactggacaacgatgacggtgttgctcttttccgttgcgcagttcggcgtggttgaatgcgccaacggaatgaaaaacagcgaaaaaagtaatgtcagtcttttcatcatggatgcctcatgcttactgttctgaaggcatgacttactaaataaaactgtccgtcatgccttatcacgtctccttattcggggaataacgccctgatgtttgcggccatctggctggttggctgcgcctctggcgcagcctgtgctttggttttttcctccctgacctgtgtcacgggtaacgcctcatcgtcagcccatgcagccagtcggtaagcctctgccggattcattttcagaagtgccagcccggccagaaaagccacacgttggccgcttttgcgggcttctggtgtaaggctgtccagccaggcgcatgcttcgccttcgttcttgacggcggcgggcttcagatagaaacttatccgtctggttggtgtcgtcattggtttactccttgtccattgcgtacagcccattaaccagagcaaactgtggcaccccgtccgcgatgaaagtcgcattaactccgcaggcttcgcggatagcgggtgccacaatctccgccccgccaccgacaaccatcacccgcccgtaacccgaaaaacccgccagcgcgcggatcacgcgttgtttcagtgtttcttccttttcacgaataaccgccatcaggctgtcgtaatgcgcgtcattgtggatgtgctggcgcagccaggcttcatcgtggcgatgttcgataatggtattggcgatatggtgactggtacgcataccgttagtggccatcaccgacagtacggcatcggccatcagggaaacgcctacgtgtggatcgcaaaacacctggctgatacctgccagttgtccctggacctttgccacatccagcgtggttccgcctaaatccacaatcagcagggattcaaacggactcatgtcagccagtgccttaaagccagccggaatggattcaggcataacccgcacgttacggatagtgaatgcttcgccgttctggtactccaccgggcgcataacgttcgcttttttgcggttgatgttggccatgtccggctgtgcgtttgtgtcgaaatactcgctcagtggcagggtgacaaccacatccacctcctgtggtgtgatgcctgatttgaccagcgcgtggtgaatggcgattacattcacatcgctgtactggtattgcgtgtcggtcgtctggacaaagcgatcgctgaccggatcaaaaccatagcgcacgccatcaagcatgtagttcgcaggctgcgagccaccgaacggcgcagaccattccgacttgaagctgttcgggctgatggcgttgcggcgttcgctgttctcagtccatgccagcttgatgttggtggagccgtcgtcgatacaaattttcatgtcgcttttccttatgttgattaattaatcgattacgggattctgaaatcccgtttttgcctgttttgtgcgcgcttcatatatcgctgcgcgttttttgctcatttacgggattcgtgagtcccgtttctgtctgtttttgtttccgctggtcaggccaccccgcagcaggtctgctttgcggcgggcgcgttcagtggtttcactgattctctgtgcgtgctctgcgtcgcggatggcgcgcagcatgtcagaaagcacggtaacgggtgttttcatggtgttctggtcctgctgaagtgtggatgccaggcgtgcggcggcttcagggtctgatgcccccagctgtgccagatagctggcggccgggttatggcggatctccgtgctgcttacgccgtgattacggctcaggcgctgccagagctgcgtgattcggctgtccgggcgggtatccggtttgcgtacaatttcaaatccctgcggtgcaatgatgctgccgtcaacgtacagactgccgccccgtaacaggtgctgcatctgttgttcaccgatatgcaggccgagagattcagcagactcccgccattctttagcgagtaactcgtggttatcaggcaaaggccgctgctgtttgcggctctgtgtccagttctgcatttcatcgctgctgttttttgcctgtttgtcacgaagcgaacgcatcagcgcccggcgttcgtgccgtttcagtgagcgcatccattcatttacttcaacgccgtcaggaagctgcggccacggtgctggccgttcttccggctgttctgtcccgttgttgcctgtttcctgtacacggggacagttattgccacgagtccaaggggcggtagggccgccctgaaggtcaaaaccattttcgcgggcgctgtcttccgcttccggtttacgtcttaccagcttccagttatccgggtgcgtgcacacgcgggaagactccccgatgagcggcgaccagatcccgtaaatctgtacactctgctcgccgtaatcgttcagctcatctgcgaggtcgtaggcggtgcgaatcaggtagtctttacgtggaacaagtacgccgccctgtttttcaatgtaggaggcaaaacacccggcatcagcggcagcgagtaccgcatccattgcatcatccttcagccgttgcgggccttccgggttgcgtgccatctggctggcaaggcggcggagttcacgccatacctgacgggaggggatgccaaagaactggaactggcggacccgatgaagacgcgcccagccaatggcgcgctccacgctctcggccattgattttccggtttcgtggtcaacgcgtggcttgcccgttttcgggtcgatgccatctacggcgcggctgtccaggttttttccgatgtaggtcgcgatatagctggttggtgtgccttttgagccgtcgacatactccgccttaaagcgcggagtaatatcatcgcccagttcgtgacgatcttcctgaatggcaatatcgcgggtgatggccacgatgctgtcgatttcttccggatgagcaaagaccatcatatgccagtgcacggtgccgtcatggtgaggctccaccgtgcggatgccataccagcgcaggccgtcgcggttcagttttttgcggaccgccgcaaaaaacgtgttaaccaggtaatcgctggagtcgcgcatggtggccccgttccatttggggttcggatgaccgttctccgttgttgcgtggtattttgacgggcaggtgacagtcagaaacaccgctttgtcaccacgggcttcggccagaagttccagccccttcatggtggccatcatttctgccttacggtgaaccgggttacttactcccgcgtaatacactgtctcgagatcaatcgtgaacccgtcttcattttccagcatgaaacttttcaggaaatcgcgtgttttctcgcgctgtgcgcgaaactcgcttaacgcgtcctggctcagatagggcgatgtttttctggaaaccagacaggcggcgcggagttgttcttctctccactcgcaacgtaacagccacagtttgcgtttccaccattctgcacaggtcaggcgaaggattgcgcccggcagcagctccgtgtccggttcgttcctccggtctttgtctgttgtcagtgcgtcataatgtggaggcatggcgtgcaggtgtaacgccatgcgggccagcatctgatacgccttcagcgttacatccatggtcagttcgccatcggtcgcgccaaagccatcgcagagtttttcgaaggtgctgctgaacatcgccgccgtcatggtggccagtgtctgtatctggtgtttgttgagctgcggcaggtaaagcaaatcgtccaggcgttcgcgtccggcaagggagcgataaccctgtgtcagccagcggtgatcggtgcgctccagacgttcgaatattttgcgcaggtttccgcgcgcgtagcgttcagcctgccagctctttttgcctttctgacgatcggcttcctgttttttgcgcaggaaggagaggtggcgaataagcggatcgcgcagataggacggcagcaggcgcagcgaggccatggcttcatccaccgcgccgcgtgcctgttttctggcatctcctgccagtgtgatggttttgtcctgtttttcctgtgcgtccaggcttttattaatcaggttgcccagcggcgttgcggagaacgccgcatcagccatttcctggcggcgctcgttctctacccggtaggcatccagccaggaggaaagcgcggattcaggagcggggatccccgttccttcacgccccactgcgtggcgcggttgttgccagtccctgatgtactctgccgtcatagtgatttacttcgtcatgccattcagggtgtcgcggcagactgtagccagccgctgaatttccagcacggtgtcttctgtgtcggcatggcgatgtgtgatgcggatgctgtcggcaatcacatcgacgattgcagaggatgggcgctggtaaatgccaataacggacggggtgccaccttcaatgcggtaaagcctgtaatttccctcgtggctgtcaatcatgtaacgaccatcaataacaatctttccgtcagcgagctgcggtacaggcagggatttcaggtacatgtcataacgatcacgcacgcgagcggcaagatcacgctctgtgttgagcaggtattcaagaaagtcgttggcgagaatcattgcggcaatcctcttgttacagatgtgcgaaggcctcccgccgcaaggtgcaggaaaggcccggaacaggaattaatggagtttgttttgctgctggatgagatcctgaagagacaggaggtcttccgccagatagctgaatacagcggcgcagtagtcggctgaaatagtgctgttgagtctgtgcaatgtgttggattgcatgataaaggcgatgtgtgcagcgcgggtgagtctgcgatcgatttcagtctggatgtgacgacgctccgcgatagtgcggtgctgtttgcggtttgccatggtgtttggcctcttcgtttgtgagtttttggatactcaccaaccagagttgagaatctcggggtggcgagacgtacggggttctcaacaccggcaaacgaagaaaccggcccgaccgaagtcggccccgtacgccccaccataattctgatgcgaaaaagacgtggcaatacagtacgcacaaaaaaaccgctggcgcggttgtgcgcttcgtttgtcagcaggttgagaatcccggcacccgttttatgaggtgcagcggaaatgtaacctgactgattgcggtatggcaagcggtttttttgtgtgtgcatgttctggtttcttagtggttcagaaaaaaatcaaaaaccttgtcaatgcgttgcagcagctcttgctgtattgcttccggcgtttccggttcgcctggcgcctccaacgtcgcgcagaaatcctcgatttcatgacggagcgtcaggcgaatggcgagaggtgtggttctggcgtgctccagctcatccagcagcgccagcacagcagacggcgagagcattgcgcgaaacgccagtaatttttgaggcgttgccattcgttgcaggtcagtcgccagttcgcgtaattcctggtggttgatggcgctcatgctctggcttccttcagtagctggttaaacatgttggtaagtggattgccgcacccgaacggcatcgggtttatctggtaagaaaagcgaccgcctgttttgcgctcttttcttatgactgaaccgctgcgccagagtcggcgtaactccacattaatggctgtggttggggtattcagtgctgcggcgatttctccaccgctacaccccggattggcggcgatatagtccagaatggtcatctgcgtgactcctgtacctgtcggataaggttcacccgcaccacattcgtggcgcagaagtaagtgtcgtcagtgagataaatgtgatgcgcgtcaggttgcgaacggtgacggtcgagcgttttaatcagccgttcgtcaacttcgtattcacgtcctctggaagtgaaacgaacgacggtaaatcgcttaattgccattgcgcctccttggcgtgtgcgaatacctccgcgaatgcggattgtttttacattttcttatttaacctgtggttttatttgctctgttattcgccagtgaaaaagcgttcaatcttttttactgaatgaataattcgcataatcccaatggcgcaggccaccgaaataatcagaacaagccatgagataaatatactcatgcaatattccccagcttatacggttcaatatgttccccgcattctgcggcacagatcagctcggaaagttcgttaagtgcatccagatcatcagcgtaaaaagccacgtcatacagactccggattgccctggtcaatgagtcacgggctgcacgttcagcatgagcgcctgatgcgcttaagcgaaaataaaaacgctcaagtgctttgttaatgagagttttatattctttgcccatcacaacgccctttaatctgctttcttaatttcagcttctgaatccatacaaataatttcgatatagggttcatcgccattagcttggcgcgctttttcagcttcgttaatggcttcgcgaacggtctggtacggaagctccacgatcagttgtgcgttgttcgcataaacgtgagtaactgcttttttttctgcctgggctacagcatcaatagctgatgcacgtaataacagttcaccgcgaaaatcaataaaacggataaatacaccttgtgcatactctttggtcataaatcacctgttataaatcaacctgtttaataaaactttgtccgcgaagcagacgatcaaccgtgcgaagtgcttcgtataatgtgaaatcctgcccgaactgattgtcgccgctgctcagtgcaaaaatgcggtttccggtaaacggattgcgtgggcatttgtggaccacgattccagctttctcaatcaaccaggcgtgctcgccgatttgttttactgggtagccatccggcgttgcgtgtgtttcgctcaggctgtagcgagagttgctacgtgatgcactggtagcgaaacggttagcatggcgttccgccccgttgcggaagcgctgctgtgaagaattgcgacgttccttcatatcaaaatactccgcctaaaatgaataatggtttgagttatgctgctttaccgctgatatttctgtttcgtctgccacttgttggcttaaacaaaaacagacggttttcccagtcgtgccattcctgaggtgcgttttcgatgaggcgatcgcatgcttcatcccacgcttttctgttgatgtagagttcagcgtttccgcctggcttgagagggtccgccatatacaccgcaggtagctttcctgcttttgccatgcttacgatggcatcaacggtctttccgatatacatcgcaaatccttcttttgacaggagatgcgagggattttctgaaagtcgaatttcttcacgttcacgtgctttgcgtcctgttttttgatgctcaccttctggcatttctgacaggtgatcgcatcgtgttccgcaaagtgactcaggcgcgttttgagtgctttcttgcatctgatatcctccgctattggtgctttcttctaactagcaccatttagaactagttagcgcaattcgttgtgtgttaattgatgtataaactaagtgagttaacttactatgtcaactaccgtagctatgaaaattcgcatcatgcggaagtcagaaatgcttacacaagaaaaaatggcagagattactgggcttactcttgctgcattaaggcaatatgagcaaggacgaaatgaacccaaccttgagtcaacaaaaaagcttctgaaagcccccatgttccgtaagtaccgcgactggtttttgtttgatgaagttgaacccaaggccgggcaggttgtaccggctctcgcacacattgggcaaggcgaagcggaatcatcccgctccggcaagaaaactggttaacggttcaccaggcatttatttcccagagctgtgatcaagatgatgttttcattggagggcttccttatgtcgattaagaagctcgctaatggcaaattttgtgtggacgtgcggccagctggatcagaaggaaagagattcaggcggcgatttgatactcgtggtgaggctgttttgtatgagcgtcatgtattgcagcattaccacgacaaagattgggttgataagccaacagaacggcgctcgctgagggagttgctggattgttggtggctataccacgggaaaaatcatccttacggtgcgatggagcgagtgcgtatttctgcggtcattagtgatcttgaaagtattaatgttacacgcagtgaccaacttactcgtaagaacataattaattatcggttattgttgcttaatcgcggaataaaacaatccacggttaatcgttattgcgcaatgatgagtggtttcttcacaaaactaattgacgcagaggaatattctggggctaatccgtttcatgatgtgaaaaaacttaatatcaaacagcctgaaatggcttatttgtatcatgaagatattccacgattactggagttgttatctggtgatgaattaaaagccgtcttgttgtgtctggcaacaggtggaagatggagtgaggttgcaaatatcaagggggagcatgttattagcggcaaagtcatttttatggaaaccaaaaatgggaagcgtcgcgttatacctatatcgtcagaactggagtgcatgattaaaacaaaggccactggtcgtttaatttatccaagttatgcagctgtcagagctgctatcagaaaggtgaggcctgatcttcctgaagggcagtcgatacatgttttacggcatacctttgccactcacttcatgattaatggtgggaatatcatcactttgcagagaatacttggacatagcactattcagcagacgatgacttatgcccattttgcaccggattatctacaggatgctgtgcgctttaatcctgtggctgagttgtccagatattgcccataaaataggactaaataagcccacttaagactatgtgtattaatgtaactatttgatatatcaaagggaggccagtgtgctcggcctccttcatgtcaccttcgggtggcgttgttttatgcgatgtatctcgcgatttttttttgtaacttttccatcttttgcttttctctccgagccgctttccatatctgcaatcgcataaaaaactctgctggcgttcacaaatgtgcaggggtaaaacgggggcacgctttgaacggtgagtatgagtgaggtcggctaacttccagcaagtggctatgaacagcaaaatggtggtcgggtttgcttgttcttaccgttcaagccttgcaaccgctgagaataatgatggtggaatagagagtttatttatcgcgggcataaaaaaacccttactaaccgaagcccggcgttcagggttattgcgctagaagaacttatttattctttgcgcgctcgaaggaagcaacgatttcagctttagcggcttctgcgttttcccaaccttcaactttcacccacttgcctttttcgaggtctttgtagtgctcgaagaagtgagcgatctgcgctttcagcagctctggcagatcgttaacgtctttaatgtgatcgtattctttgctcagctttgtgtgcggaacagcaatcagtttcgcatcttcaccggcttcgtcggtcattttcagaacgccaaccggacggcaacggatcacagaacccggctgcagcgggtacggagtcgggaccagtacgtcaaccgggtcaccgtccagagacagggtgtggttgatgtaaccgtagttgcacggatagaacatcgcggtggacatgaagcggtcaacgaacagtgcgccgctctctttgtcgatttcgtatttgatcggatctgcgttagccgggatctcaataacaacgtagatgtcttccggcagatctttacccgcagggacgttgagtaagctcatgtctgtttcctttaaaaatatgtggcaaacaagtgccgagtattatagccaactcgcgccgaatgtcttcgcttgttttcgtcttcattttcctttttcgccaattttaagacggtatacagagcaggaaaatccataaccgtagccgcatttttcatagtgagatgaaagcgattacaaacttgtgattaacgttttatttacttctttgaagtgtgatgtaacgcaatccgttacataacgaattgtctatagttttttcgcgaacatcttttcaccaataataattaccccgacgaggacaaccctatgtggaaacgcttacttgtagtctctgcagtctcggcagccatgtcgtctatggcgttggccgctccattaaccgtaggattttcgcaggtcggatcggaatctggctggcgcgccgcagaaaccaatgtggcgaaaagtgaggccgaaaaacgcggaattacgctgaaaattgccgatggtcagcaaaagcaggaaaaccagattaaagcggtacgttccttcgtcgcgcaaggggtggatgcgatctttatcgctccggtggttgcgactggttgggaaccggtattaaaagaggcgaaagatgccgaaatcccggtcttcttgctcgatcgttctattgatgtgaaagacaaatctctctatatgaccaccgtcactgccgacaacattctcgaaggcaagttgattggtgactggctggtaaaagaagtgaatggcaaaccatgcaacgtggtggagctgcagggcactgttggggccagcgtcgccattgaccgtaagaaaggctttgccgaagccattaagaatgcgccaaatatcaaaattatccgctcgcagtcaggtgacttcacccgcagtaaaggcaaagaagtcatggagagctttatcaaagcggaaaacaacggcaaaaacatctgcatggtttacgcccataacgacgacatggtgattggtgcaattcaggcaattaaagaagcgggcctgaaaccaggcaaagatattctgacaggttctatcgacggcgtaccggatatctacaaagcgatgattgatggcgaagcgaacgccagtgttgaactgacgccgaatatggcaggtcccgccttcgacgcgctggagaaatacaaaaaagacggcaccatgcctgaaaagctgacgctgaccaaatccaccctttatctgcctgataccgcaaaagaagagttagagaagaagaaaaatatggggtattgagggttgctatgcctgatgccgattcgtaggccggataaggcgctcgcgccgcatccggcggtggtgcgctgaagcctgatgcgacgcttaccgcgtcttatcatgcctactgggagcacgctttacaccgggggaaaccatgacgactaaccaacaccaggagatcctccgcaccgaaggattaagtaaatttttccccggcgtcaaagcgttagacaacgttgatttcagcctgcgccgcggcgaaatcatggcgctgctcggtgaaaacggggcaggaaaatcaacgctaatcaaagcattaactggtgtataccacgccgatcgcggcaccatctggctggaaggccaggctatctcaccgaaaaataccgcccatgcacaacaactcggtatcggcaccgtctatcaggaagtaaacctgctacccaatatgtcggtcgctgataatctatttataggccgcgaacccaaacgcttcggccttctacgccgcaaagagatggaaaagcgcgccaccgaactgatggcatcttacggtttctccctcgacgtgcgcgaaccgctcaaccgcttttcagtcgcgatgcagcaaatcgtcgctatttgccgggctatcgatctctctgccaaagtgctgatcctcgatgaacccaccgccagtctcgacacccaggaagtggagttactgtttgacctgatgcgtcagttgcgcgatcgcggcgtcagcctgatttttgtcactcactttctcgatcaggtctatcaggtcagcgatcggatcaccgtcttacgcaacggcagtttcgtaggtgtcgggaaacgtgcgagctaccgcagatcgaactggtaaaaatgatgctggggcgcgagctggatacccacgcgctacagcgtgccgggcgaacattgttgagcgacaaacccgttgccgcgttcaaaaattacggcaaaaaaggaacgatcgcaccgtttgatctcgaagtacgccccggcgagatcgtcggtctggctggattgctgggatcaggacgtaccgaaaccgccgaagtgatcttcggtatcaaacctgctgacagcggcacggcgttgatcaaaggcaaaccgcaaaacctgcgatcgccacatcaggcttcggtactgggcattggcttctgcccggaagacaggaaaaccgatggcatcatcgctgccgcctcggtgcgggaaaatatcatcctcgctctccaggcccagcgcggctggctacgtcccatttcccgcaaagaacagcaagagattgccgaacgctttatccgccagcttggcattcgcacaccttcaactgaacaaccgattgaatttctctctggcggcaatcagcaaaaagtgttgctttcacgttggctactgacccgaccgcaatttctgatccttgatgagccaactcgcggcattgatgttggtgcccacgccgagatcatccgcctgattgaaacgctatgcgccgatggtctggcgctgctggtgatctcctccgaactggaagaactggtgggctatgccgaccgggtgatcatcatgcgcgatcgcaaacaggtggcggagatcccgctggcagagctttccgttccggcgatcatgaacgccattgcggcgtaaggagaacagtgtgatgcctcaatctctcccggacactacgccgccgaaaaggcgctttcgctggccaacgggaatgccgcagctggcggcactgttgctggtgctgctggtcgatagcctggtggccccgcatttctggcaggtggtgctccaggatgggcgtttattcggtagccccatagacattcttaaccgtgcggcccccgttgcgctgttggctatcggaatgacgctggtgatcgcaacaggtgggattgatctctccgtgggggcggtgatggctatcgccggagccacaacggctgcgatgacggtcgcgggattcagcctgccgattgttttgttaagcgccctgggcactggcatcctggcgggattgtggaacggcatactggtagcgatcctcaaaattcagccgtttgttgccaccctgatcctgatggtcgccgggcgcggcgtggcgcaactgatcacctccggacagatcgtcacgtttaactcgccggatctctcatggtttggcagtggatcgctgttgttcctgccaacgccggtcattatcgcggtgctgacgcttatcctgttctggctgttgacccgcaaaacggcgctggggatgtttatcgaagccgttggtatcaacattcgggcggcaaaaaatgccggggtaaacacgcggatcatcgtcatgcttacctacgtgttgagcgggctgtgtgcggcgattgcgggcattatcgtggcggcggatattcgcggtgccgatgccaataacgccgggttatggctggagctggacgccattctcgcggtggttattggcggcggatcgctgatgggcggacgttttaacctactgctttcggtggtgggggcgctgattattcaggggatgaacaccggaattttgctttcgggctttccgccagagatgaaccaggttgtaaaagcggtggtggttctttgcgtgctgattgtccagtcgcaacgctttatcagtctgattaaaggagtacgtagccgtgataaaacgtaatttgccactgatgatcaccatcggcgtctttgtgttgggttatctttactgcctgacccagtttcccggttttgcttccacaagagtgatctgcaatatcctgaccgataacgcctttcttgggatcattgccgttggcatgacctttgtgatcctctccggtgggatcgatctctccgtcggttcggtgatcgcctttactggcgtgtttctggcaaaagtgattggcgatttcggcctctcgccgctactggcgtttccgctagtgctggtgatgggctgtgccttcggcgcatttatggggcttttgatcgacgccctgaagatcccggcatttatcattaccctggcggggatgttctttttgcgcggtgtcagctatctcgtttcggaagagtcgattccgataaaccatcccatttatgacacgctctcaagccttgcgtggaaaatccctggcggcggtcgcttaagtgcgatgggactgctgatgttggcggtggtggttatcggtattttcctcgcgcatcgtacccgttttggtaatcaggtatacgccattggcggcaacgcaacgtcggcgaacctgatggggatttccactcgcagcaccactattcgcatttatatgctctccaccggactggcaacgctggcggggattgtcttctcgatttatacccaggccggatatgcgctggcgggcgtaggtgtggaactggatgctatcgcctcagtggtaattggcggtacgcttctgagcggtggcgttggaacggtattagggacgctttttggcgtggcgattcaggggctaatacagacttatatcaactttgatggcacgctgagctcatggtggacgaaaatcgccatcggtattttgttatttatttttatagcattacagcgtggattaacggtgctgtgggagaatcgtcagagttcgcctgtgacaagagtcaacattgcgcagcgataaaaacgcctctccgtgtggagaggcgcaggagattacgcgtccgggaactcacggataaagcgttcgacatcttcaaccatatggtcgttgccgacaaagaacgaacggcgctggtgcagagtttccgggatgatatccagaatacgctctttgccatcgctcgctttaccgcccgcttgttccgccaggaatgccatcgggttgcactcatacagcaaacgcagtttgccgtccgggtggctggcggtgcttgggtagagataaataccgcctttcagcaggttacggtggaaatccgcgaccagtgaaccgatataacgtgaggtataagggcggttggtggacttatcttcttcctggcagaatttaatgtacttcttcaccccgttcggaaacttaatgtagtttccttcgttgatggagtaggttttgcctttctccgggaagcgcatccgttcctggcacagacagaaaacgcccagcgaaggatcgtaagtaaaggcgtgaacaccgcatccggtggtgtaaaccagcatggtagaggagccgtataccacgtaacctgccgcaacctgtttgttaccaggctggaggaaatcttcttccgttaccggcgtgccaacaggcgtaacgcggcggtagatggagaaaatggtaccgacagagacgttaacatcgatgttggacgagccatccagtgggtccatcagcaccacgtattttgcgtgttcacagccttcaaagacgacaatctcatcttcttcttcagaggcaatgcccgcaacgatatcgcgtgctttcagtgcggctttcagtttttcattagcgaacaagtcgagtttctgctgaacctcgccctgcacgttctcagcaccgctggcacccaggatatcaaccagtcctgctttgttgatatcgcgatggataatcttggcgcccagttttattgccgacagcaaagcagtgagctcaccggtagcatgagaaaactcgtgctgcttttcgacaataaattcacctaacgttttcataaaactttccctgcaatgtttatggagtaaagcgaccgcaacaatcttaacaaataatctcaatgttgcgctcaggtgaatcgcgccagcaaattgcggattatcctgaaatgcgtttctcacttgcccgacatatgcgtaaaatgagcggcagattaaaaaaggatagtgacgtatgcgcattcatattttaggaatttgtggcacgtttatgggcggtctggcgatgctggcgcgccagttaggccatgaagtaacgggttcggacgccaatgtgtatccgccgatgagcaccttacttgagaagcaaggcattgaactgattcagggttacgatgccagccagctcgatccgcagccggatctggtgattattggcaacgccatgacccgtggaaatccgtgtgtggaagcggtactggaaaaaaacatcccttatatgtcaggtccacagtggctgcacgattttgtgctgcgcgaccgctgggtgctggccgttgccggtacacatggcaaaaccaccaccgcgggaatggcaacctggattctggaacagtgcggttacaaaccgggatttgtgatcggcggtgtgccggggaactttgaggtttcggcgcgtctgggcgaaagcgacttctttgttatcgaagcggatgagtatgactgcgccttcttcgacaaacgctctaaatttgtccattactgcccacgtacgctgatcctcaacaaccttgagttcgatcacgccgatatctttgacgacctgaaagcgatccagaaacagttccaccatctggtgcgtatcgttccggggcagggccgtattatctggccagaaaacgacatcaacctgaaacagaccatggcgatgggctgctggagcgagcaggagctggtgggtgagcaggggcactggcaggcgaaaaagctgaccaccgatgcttccgaatgggaagttttgctggatggcgaaaaagtgggcgaagtgaaatggtcgctggtaggcgaacataatatgcacaatggcctgatggcgattgcggcggctcgccatgttggtgtagcgccggcagatgccgctaacgcgctgggttcgtttattaacgctcgtcgccgtctggagttgcgtggtgaagcgaatggcgtcacggtatatgacgattttgcccatcacccaacggcgattctggcaacgcttgcggcgctgcgtggcaaagttggcggtacggcgcgcattattgccgtgctggaaccgcgctcgaataccatgaaaatggggatctgcaaagacgatctggcaccttcattaggtcgtgccgatgaagtcttcctgctgcaaccggcgcatattccgtggcaggtggcagaagtggcagaagcctgcgttcagcctgcacactggagtggcgatgtggatacgctggcagatatggtggtgaaaaccgctcagcctggcgaccatattctggtgatgagcaacggcggttttggtgggatccatcagaaactgctggatggtctggcgaagaaggcggaagccgcgcagtaattcggccttagcctgatatagtgtgcgtaggccggataaggcgttcacgccgcatccggcatttgagcatagtgcctgatgcgacgcttgatgcgtcttatcaggcctacaggtgcaccgcatccggcaaaccatactcacatcaacaacgaaaattacccttcattctccgccagttcgcgcagatactggaaaatctggcgtgcggatttcggcggcttattcccttctttctctttcttcgcgttgcggatcagagtacgcagttgctgacgatcggcatcgggccacagatttaatacctcagcgatggcgtcatcaccttgatcgatcagacgatcgcgcaggttttccagtttatggaacagcaccacctgctggttgtgacggtttttcagcttatccagcgcctgacgaataggctctacgtcgcgctggcgcagcatcttaccgatgagctgcaactggcggcggcgaccttccatcttaatacgctgggcgagctcaatagccgcgcgcagatccgcatctaacgggatcttatccagcgcgtttttccccagatcaacaatttccgcgccaaggcgttttagctcctcggcatcacgtttaatttcacttttactgacccagataatttcatcgtcttcgtcttcgatgtcatcaccgggaacgtcgtcgagccagtcttcgggctgcttagtcatctcaggctccttaaaaaaagaggctaatgttaccagttaagatgcgcactgaaaaacggttctctgttagacttcagagaaactctctacattatggcacttgcaatgaaagtaatctctcaagttgaagcgcagcgcaagattctggaagaagcagtttccactgcgctggagttggcctcaggcaaatcggacggtgcggaagttgccgtcagcaagaccaccggcattagcgtaagcacgcgttatggtgaagtggagaatgttgaattcaatagcgatggcgcgctggggatcactgtttatcaccagaaccgcaaaggtagcgcatcatccaccgatttaagcccgcaggccattgcccgtactgtacaggcggcgctggatattgcccgttatacctcgccagatccctgtgccggcgtggcagacaaagagctgctggcctttgacgcaccagatctcgacttgttccaccctgcggaagtttccccggatgaagccattgaactggcggcccgcgcagaacaggcggcattgcaggcggacaaacgcatcaccaataccgaaggtggcagctttaacagccactacggtgtcaaagtttttggcaacagccacggcatgttgcagggttactgctcaacgcgtcattcgctctccagctgtgtaattgccgaagaaaatggcgatatggagcgtgattacgcctacaccattggtcgtgcgatgagcgatctgcaaacgccagagtgggttggggccgactgtgctcgccgtactttatcgcgcctgtcaccgcgtaaactctccaccatgaaagcgccggtcatttttgccaatgaagtggcaaccgggctttttggccatctggtgggggcgatagcgggtggatcggtttaccgtaaatccaccttcctgctggattcgctgggtaaacaaattctgccggactggctgaccattgaagagcatccgcatctgctgaaagggctggcatcgacgccatttgacagcgaaggtgtgcgcaccgagcgtcgcgatattattaaagatggcatcctgactcagtggctgctgaccagctactcggcgcggaaactggggctgaaaagcaccggacatgcgggcggtattcacaactggcggattgccggacaagggctaagcttcgaacaaatgctcaaagagatgggtaccgggctggtggtgacggagctgatgggccagggcgtgagtgccattaccggtgattattcccgtggtgcagcgggcttctgggtagagaatggcgaaattcagtatccggttagcgaaatcaccatcgcaggtaatttaaaagatatgtggcgcaatattgtcaccgtcggtaacgatattgaaacacgcagtaatatacagtgtggttctgtgctgttgccggagatgaaaatcgccgggcagtaaaaaactggcgcgacctgccgcgctataaactaaaaaattacacaaaatcattcgcactgcatcgagacggaaagtgaatgagggccggggagcgtactcgcagtacgtgacccgggcgaataagcgtagccgtcgatgaggcagtgtgaaggatgaagtgtaaataaaaaaggaagtgagcaatgcgtaaaagcctgttagctattcttgcagtctcctcgttggtattcagttcggcgtcgtttgccgctgatcttgaagacaatatggaaaccctcaacgacactttaaaagtggtcgaaaaagccgataacgcggcgcaagtcaaagacgcgttaacgaagatgcgcgccgcagcgctggatgcgcaaaaagcaacgccgccgaagctcgaagataaatcaccggacagcccggaaatgaaagacttccgtcacggtttcgatattctggttggtcagattgacgacgcgctgaagctggcaaatgaaggtaaagtaaaagaagcgcaggctgccgcagagcaactgaaaacgacccgcaacgcctatcaccagaagtatcgttaattcctcatttccctgttgcctgcactcaggtaacagggaacttatcatcgcaaatgatgcaccacctgattgctgctgccgcgccagatcagggaagggtcttttaaatcctgcacaaatttgccgtcgaccagtacgttaatcaaatcaacaacctgcatttgcgcagcgttgagatcgtcgagtttatagcctgtccacacccagatgtctttatccggacactcggcgcggatgcgttttaccagtttcagaatatccggcacgttttgcggatgcagcggatcgccgccggagagggaaatcccctggcgtttgatacgagtgtcattcagatcgttaatgatctggtcttccattgctttggtaaatggctgaccagaatttacccgccatgtgcttttgttatagcaaccggggcattcatgaacacacccggagacaaacagggtgcagcgagtgccggggccgttgacgatgtcgacaggatagtactgatgataattcattatttcgcctggcttatcagtccgcgtgtaggctgcatccggtaatcaatgcctgatgcgacgctgtcgcgtcttatcaggcctggagcagttgccaaatgtaggccggataaggcgtttacgccgcatccggcatttgcttaacgtagagtgaagattaacctatctgcccatttcccaaatgtttaacgcggcgcttaacttcttcctgcttaccggcgttaaatggacgtgcatccgggctacctaaatatccgcacacgcggcgagttaccgacacacgggaggcgtcatggttaccacatttcgggcaagtgaagcctttgctggtgcactcgaactcaccggtaaagccacactcgtagcactcatcaatcggtgtattggtgccgtaatacggtacatgctgatagctgtaatcccagacatcttccagcgccttcaggttgtgctgaatgtttggatactcgccgtagcaaatgaaaccaccgttcgccagcggcgggtaaggcgcttcaaagtcgatcttgtcgtacgggttcaccttcttctccacatcgaggtggaaactgttggtgtagtaacctttatcggtcacgcccggcaccacgccaaactcagcagtatcgagacggcagaagcggtcgcacaggttttcactcggcgtgctgtagagactgaaaccataacccgtttcttctttccactgatccactgcctgacgcagacgttcaacaatggcgatacctttcgcgcgaagctgctcgttgtcgtaaacatgctcgccgccgaacagcgcgttaatggtttcgtggatgccgatgtaacccagcgaaatagacgcacgaccgtttttgaagatttcagaaacatcatcgtcagcattgagacgcacgccacaagcaccttccatatagaggatcggggccacgcgcgctttcacgccttcgagacgagcgatacgggtcatcagcgccttacgtgccagcaccagacgttcatccagcagcttccagaaggtggcttcatcgccttttgcttccagagcaatacgcggcaggttcaggctgatcacgccgaggttgttacgaccatcgtggatctgctcgccgttttcattttcccacacgccgaggaagctgcggcagcccatcggggttttaaacgaaccggtgactttcactacctgatcgtagttcaggatatccggatacatgcgcttgcttgcgcactccagcgccagctgtttgatgtcgtagttcggatcgccttttttatggttcagaccatcgcgaatcgcaaacaccagtttcgggaacaccgcagttttacggtttttaccgagacctgcgatacggttacgcaggatagattcctgaatcaggcgcgattcccagctggtgcccagaccaaaaccaaaagttacaaacggcgtttgaccgttggcggtatgcagggtgtttacttcgtactccagcgactggaaggcatcgtagcactctttaatggtacgagagttagcgtagccttctgcgtccgggatgctccactcttctgcggtcttgcgatgtttgttgtagctggcggtgacaaacggtgccagcacttcatcgatacggttaatggtggtgccgccataaatatggctggcaacctgagcaataatctgcgcagttaccgcggttgccgttgagatcgacttcggcggttcaatctcggcgttccccattttaaagccctgggtcagcatgcctttcaggtcgatcaacatgcagttgaacatcgggaaaaacggtgagtaatcgagatcgtgatagtgaatatcgccacgctcatgtgcctgcaccacgtcacgcggcagcaggtgctgacgtgcatagtgtttagccacgatcccggccagcaggtcgcgctgggttggaatcaccttgctgtctttgttggcgttttcgttgagtaacgaggcgttggtctgctcgaccagaccacggatctcctggttcaggcgaccgcgtttttcacgttcaatgtcgcgatcgtgacggtactcgatgtaagcacgagccagttgtttgtatggacccgacatcagctggttttcaactgcggtctggatctcattgatatccacctggttgcggccctgcatctgctcgctgacaaccgcggcaacagtggcgcaataatcggcatcatcgacttccgctgctttagctgcacgcagaatcgcttctttgatgcgctctgatttaaacggcactttgcagccgtctcgtttcatcacatgcggtgtcatgatcgctccatatttttaagaacaggttatccacagaaattgggaaaggcgttttccggttttttcgtttcgttttccggtgctttccgcaatcgccatccgcttatccacaacgccgcacctttttcgtggggagctgtagtagcaattatagtcgattaatacaacatattgggttgggacgcattttaaagtctatatatagtgctttgcatcaaggatgtttgaactttttttgatgtagctcaaagtaaaaagcagagcgtacggatgacgggcgctacagcgttatgtaaattttttaatgaatttgctggttgaaaaatcaacaaaaacaacatgctgacagacaaaaccccggaatgaccggcattaccggggcttagggaagatttacttctgtaaccaccagacagcctcaaaaggccgtaaattcatggcacagggttgtggtgaggcttcttcgtagttatgcatcacaagctgccagttgccgcgcatttgccctggctgccagggttggatctcacggctaaggttggcaatgaccagcaaggtttgccccttccattcacggcgatagcaccacaatacagggctgtttggcagcagatcctggtaattgccccatgtcaggatggcttcctgcttacgcagtgcgattaacttttggtaggtgtaaaacaccgaggaatcatcggccagcgcggcttctacgttgatttgttgatagttatcgcccaggccaatccacggttcgccagccgtaaacccggcattatcgccgttgctccattgcatgggcgtgcggctgttgtcacgggatttactggcgaggattgccaataactcgtcggcatcacgcccatcgttgcgcagctcggcaaacatattgaggctctccacgtcgcgatagtcagtaatgcgcgtgaaatgcgggttggtcatgccaatctcttcgccctggtagatatacggcgttccctgcatgccatgcagcaccatcgctagcatttttgccgcaggcacgcggtattcaccttcatcaccaaagcgagaaacaatgcgcggctgatcgtggttacaccagaacaaggcattccatgctacgttgtgcattccttgttgccagtggcggaacaatgttttcaacgccacaaagtcaggtttagccagcgtccatttttcaccaccgggataatcgaccttcaggtgatgaaaattaaaggtcatcgataattcactgcctgccagtgccgcgtatcgctggcaatgctcaaggctggtggaggacatttcacctacggtcattaacccgcgtggcgtaaacacatcgcggttcatctcgtgcaaaaactcgtgtgctcgtggcccgtcggtgtagaagcgacgcccgtcgccatccaggtcttcagggaaacgcgggtctttggagatcagattcaccacatccaggcgcaacccatcgaccccacgatcggcccagaattcacagacttttttcagctctgcgcgtaccgctggattctcccagttgagatccgcctgttctggtgcaaagagatgcaaatagtactgttcgctttccgcatgccagcgccacgcactaccgccaaattttgaacgccagttattcggtggcgtttctggttcgccatcgcgccagatataaaactggcggtaagggctttctttgttcagcgcctcgcgaaaccaggcatgttgggtagaggtatggttaaacaccatatcgagaatgatacgaatcccgcgcgattttgcctgcgtcaccagttcgtcaaaatcgtccagcgtgccgtaggtgggatcaatcgccgtatagttcgctacgtcgtaaccgttatcgacctggggagagacataaaagggggttagccagatggcatcaacgcccagtttatgcagatagtccaggcgttggataacgccacgtaaatcgccggtaccgctacccgtggtgtcctgaaaactctttggataaatctggtagataacgccgttttgccaccagtggggaagattagtcattacgttattcctgcgaatgcgagggggcgcaattgcgccccgaagaaaattaaacaatgtccagcgtgcccaggcggtatttccgctgatagataaacgaggtgagtacaatcgggatgatgatggcgatagccattgccagcgcaaacacctgccagtagctcggttgaatcgagagaattcccggcaggccgcctacgccgatgccattcgccataacgccgttcaggccgcatagcaatcctgccagaccagaaccaatcatcgcgcacagcatcgggaagcgatatttcaggttgatgccgtacattgcaggctcagtgaccccaagccaggcggagatagcggcaggcacggagatctcgcgttcattgtgcttgcggctggaaatgataatgcctatcacggcggagccctgagcgatattcgacagcgcaatcagcggccacactggcgtaccacccatgctttgaatcatctgcaaatcaatagcaagcgtggtctggtgtacaccggtgatcaccagcggggcgtacaggaagccaaacaatgctgcgccaataggtgcaaagctgccggtcatcaggtgacgtaccgcaaaggcaacgccatcgccaatcatgcgtccaaacggaccaatcagcgcatgggcgaggaacaccgcgaggatcagcgaacagacgggcaccaccaccagatagaggtaatccggcacgatgcgtttaaggcgagtttcaataacgcccagcgccagcccggctaacagtgccgggatcacctgcgcctgatagcctactttggcgatgctgaacatgccaaagtcccacacttccggcagctgctgcccgagcagataagcgttcatcagctgtggagaaaccagcgttacgccaagtacgataccaaggatcggcgtgccgcccatttttttcaccgctgaccagcaaatcccgaccggcaggtagaagaagatcgcttcaccgatcaaccacagaaaatcgtagatcgtttgcagggaagggtacatttgcgccagcgtttgaccgttgctcatgggcaaatcgccgatcacattgcgaaaaccgaggatcaaaccgccgctaatcaacgcgggcagcaacgggaagaagatctccgcgaaatgagagatcaactgctcatgccatttcatattctgccgggcggctttttttacctgctctttatcaacctgcgcctgtccggttgacgcaatcagtgcttgatagtaatcacccacattggtgccaatcaccacctgaaattgcccggcattggtgaaacagcctttcaccatggggagttgctcaatttctttcggtctggcattggccggttggttgaggacaaagcgcaggcgagtaatacagtggctcaccgtcgcaatattgccgcgcccgccgaccagttcaatcaaccgatcgatatccgtttggtttattttgctcatcataaagccccatggcagatgacatttttggttggctgcagaatatattgcgcggaaaaatttaaaaacgggaacgttcccgaaacgcagcgaagatcacaatttatcgttcaggaaacgatcaggacagggtggcggggatgatgatttgttgcggttcgctgcgcccggttacctgtgcgatcaattggcaggccgcctggcgtccagcttcggcgtaaccaggatctacggtgacgatctccggatgaaggaatttcattaacggcgtattaccgacgctcgccagttgcaaggtgtcgatgcgttgctcttgcaggtatttacttgcgccaagtgccagcgtgtcggttgcgcacagtaaggcggtagtttcaggcgtaatcacttttgctacgttctcatagccttgcttcatagcaagccctggcagagcggcaacgggatgcagtttatgcgctttgcagaacgccaggtaggcttcgtgacgtcgcttaccggtcgtcacgtcactgtgcggcacgccgagataactgatattacgatgcccctggtcatagagccgttgcatcaggatcttgattgccccttcgtcgtcataacagaccgaagcaaagccttttgcgtcacgcgccagcagaaccagcgatgactgccagtgggctaacatttcttctgttatgccggtaaaaccgaacagcactacgccgtcgatattacgccgttttaggatccccaaatgttcggcaactaattgcggggaaaactgactttccatcatgattgggtcgtaaccttgttcatagaacgctggcagcatggtttgaacggcgagattttctgacaacgaatccaggcgggtaacaatgatggcgaccactttatcgctttgcccacgcatagcgcgcgcagagcgggaaggggaaaatccatgctgattcatcactgcttccacgcgctcgcgcgtgcgctggctcacgccgctttcgttattcagcacccgggaaaccgtagatttccccacgccgcttaagcgcgcgatgtctttgatggtcagccgattttgcatcctgttgtcccgtaacgtgttgtttaattatttgaggctaactttacccgtgcattcagcaatgggtaaagtctggtttatcgttggtttagttgccagcaggtattatatcgccataaatgctacgaatattattggattctccttattatttgcggcgcttttttcacttaccggaggttatatggaacctgatcccacgcctctccctcgacggagattaaaactttttcggtaagcccgtcttttcacggcgttaccggatgcgtaaggccgtgacgttttaacgtccctgctcagctttattaccttcaggtaaggcttcgccacgcctgaagacatttctgtactgtttcagacagtgcggagggactccttatgtttaaagaaatttttacccggctcattcgccatttaccttcccgtctggttcatcgtgatccattgcctggcgcgcagcagacagtgaatacggtggtcccgccgtccttaagtgcgcattgcctgaaaatggcggtgatgcccgaagaagaattgtggaaaacgttcgacacccatccggaagggttaaatcaggcggaagtggaatctgcccgcgaacaacatggtgaaaataaattacccgcacaacaaccgtcgccgtggtgggtacatttatgggtctgctatcgcaacccctttaatattttactcaccattctcggcgctatttcttacgccacggaagatttatttgccgcgggcgttatcgcgctaatggtcgccatttctacgttgctgaactttattcaggaagcacgttccactaaagcggcagatgccctgaaagcgatggtcagcaatactgcgacggtgctgcgcgtaattaacgacaaaggcgaaaatggctggctggagatcccgatcgaccagctggtgcccggcgatattataaaactggcggcgggggatatgatcccggcagatttacgtatcttgcaggcgcgggatctgttcgtcgctcaggcgtcgttaaccggtgagtctctgcccgtagaaaaagcagctaccactcgccagccggagcacagcaatccgctggagtgcgacaccctgtgttttatgggcaccaccgtggtgagcggcacggcacaagcaatggtgattgctacaggtgccaatacctggtttggtcaactggcggggcgtgttagtgagcaggaaagcgagccgaatgcctttcagcaagggatcagccgcgtcagtatgctgctgattcgctttatgctggtgatggctccggtggtgctgttaatcaatggttacaccaaaggcgactggtgggaagcggcactgtttgcgctttcggtcgcggtaggcttaacgccggaaatgttgccgatgattgttacctcgacgctggcgcgcggcgcagtaaagctgtcgaaacagaaagtgatcgtcaaacatctggatgctattcagaactttggcgcaatggatattctgtgcactgataaaactggcaccctgacacaggacaaaattgtgctggagaatcataccgatatctccggtaaaaccagcgaacgcgtgctgcatagcgcgtggttgaacagtcattatcagaccggacttaaaaacctgctcgatacagcggtgctcgaaggtacggatgaagagtcagcgcgctcgctggccagtcgttggcaaaaaatcgatgagattccgtttgatttcgagcgtcgccggatgtcggtggtagtggcagaaaataccgagcaccatcagctggtttgcaaaggtgcattgcaggaaatcctcaatgtgtgttcgcaggtgcgtcacaatggcgagattgtgccgctcgatgacatcatgctgcgtaagattaagcgggttactgatacgctgaatcgtcaggggctgcgcgtggttgcggtggcgacgaaatacctgccagcgcgtgaaggagattaccagcgggcggatgaatccgacctgatcctcgaaggatatattgctttccttgatccgccaaaagagacaactgctccggcactgaaggcattaaaagcgagtggaattaccgtaaaaatccttactggcgacagtgagttagttgcagcgaaagtgtgccatgaagtggggctggacgcgggagaggtggtcattggtagtgatattgaaacgctatctgacgacgaactggcaaatctcgcacagcgcaccacgctgtttgctcgtctgacgccgatgcataaagaacgcattgtgaccttactgaagcgcgaagggcatgtggttggctttatgggcgatggtattaatgatgcgcccgccttacgcgctgcggatatcggcatttctgtggacggcgcggtagatattgcccgtgaagcggctgatatcatcctgctggaaaaaagcctgatggtgctggaagagggggttattgagggacgtcgcactttcgccaacatgctgaaatacatcaaaatgacggcgagctctaacttcggtaatgtgttcagcgtgctggtggcgagtgctttcttgcccttcctgccgatgttgccgttacacttgcttattcagaacctgctgtacgatgtgtcacaggtggcgatcccgtttgataacgtcgacgacgagcaaattcaaaagccgcagcgttggaatccggcggatctggggcgctttatgatcttcttcggaccgatcagctcgatcttcgatattctgacgttttgcctgatgtggtgggtattccatgccaacacgccggaaacgcaaacgctgttccagtcgggatggtttgtggtgggcttactgtcgcaaacgctgattgtgcatatgatccgtacccgccgtgtgccgtttattcagagctgtgcatcgtggccgttaatgatcatgaccgtgatcgtgatgattgtcgggatcgcattgccgttttcaccgctggccagttatctgcagctgcaggcgctgccgttaagctatttcccgtggctggttgcgattctggcagggtatatgacgttaacccagttggtgaaagggttctatagccgtcgttacggctggcagtaaagaataaactgggcacgatagccccgattcagattgcagacaaagtgagcgttgttcatgccggatgcggcgtaaatgccttatccggcctacaaattcaatcaattgcaggaatcacgtaggcctgataagcgtagcgcatcaggcaattttgcgtttgtcatcagatttaatccgggcatgatagcccggatttccatcaagattagcgacgaacagcgatcgcttcgatctcaatttttacgtctttcggcagacgggcaacttcaacgcaagaacgtgccgggaaggtggcattgtgttcggtgaagaaggcttcgtaggtagcattaacggttgcgaagtcgttcagatctttcacaaacacggtggttttaacgatgtcgcccactttcaggcctgcggcttcgacgatcgcttttacgttatccagcgactgacgtgcctgtgcagcgacgtctgccggtacttcgcccgttttcggatttaccgggatctggccggaggtgatgatcatattgcccagatcaacgccctgtacgtaaggaccgatagctgccggtgcattttccgtcgcgatagttttgctcatgatttctcctttattacagcggtaaaaagtctggctcattatagggagccagacttttattaccaaccgcaattaattggccagcaccacattatgggaaaactctttttcacagtatttgcatttgagcgcgatgtcattggcgcgttttcgcacggcaaagctggaagaaaccggttcggcatggctgatacagttgctgttcgggcagaccagcacattgtcgatgcgctccggcagactggggcgcgatttacccaccacttcatagttgtcgatacggttaaccgtggcttgcggcgcatacaatgccagttgatctacctgatcttcactcaaaaaggtattttcgattttgatcagatctttgcggcccatctcgccagaaggcaggttcagaccaatggtgatgcgctgatccgtttcggtcagcttgaacagactcaacagcttaaaaccgatctgggcggggatatggtcaattaccgtgccgcgtttaatagcttcaacctgcaatttattatcgtgtgtcatctctatttccccttacagtaccagatcgcgattcagaaccagtgccagtaacgcctggcgagcgaaaatcccgttgcctgcctgctggaagtaccaggcgtgtggcgttttatcaacatccgtcgcaatctcatcaacacgcggcagcggatgcagcactttcatattggctttggcgttgtggagatcgctggcgcgaagaacaaactgcgctttcacgttggcgtactcggacgggtccagacgctctttttgcacgcgggtcatgtacaggatgtctacttccgccatcacttcttcaatagagctgtgcagactccatgcgatccctttttcatcgagcatatccagaatgtattgcggcattgccagcgcgtccggcgcgatgaagtaaaaacggttgccatcgaacttcgctaacgcctgagtcagggagtgaacggtgcggccatatttcaggtcaccaaccattgcgacgtggagattgtccagacgcccctgggtttcctgaatagtgaataagtccagcaaggtttgcgtcggatgttggttggagccatcaccggcattcagtaccggtacattgccggaaaactcggtggccaggcgcgccgcaccttcctgcggatgacgcatcactatcgcatcgacgtaagtgctgataaccgaaatggtatcggccagcgtttcgccctttttacccagtgatgtattggcgctgtcggagaagcccaccacgctggcacccaggcggtgcatagatgtttcgaaagagaggcgggtacgggtagaggcttcgaagaaacagctggcaatgactttgtgcttcaacagctctggttgcgggtttgctttcagtttcgccgctgtcgccagcaccagattaaggtcatcgcgactaaggtcgtttatggaaatgatatgtttctgatatagcggattagccatcttttatctcctgacgcctgggcaaaaaaaagcccctcgattgaggggctgggaatgggtgatcaacgggaagaaaaacggcaggccagcgtcttttttcagacgcggtaagacaaaatgtcgaacacactgaaccatacatcctcccggcaaattgtccggcattatactcatagccagaagcggtgcaagcatttgatgcaatattttgtcagcgcaaacggtttatttgaattaaaagtcaaaatgtatgcatttttatttgctttgattctggaggagaactgtcgttcggtatcaataattgcagacatttcctgcttttttctttttcactttcacgcaatcagatatgcattttattccattcatccgacttatagggcggagtgtgaaaacgaacggctaacactattgcttacagctcagggatgcgcgctatcactttaatttcaaaatcaaagcctgccagccaggtaacgcccaccgccgtccagtttggataaggaggggcgctaaatatttcatttttgaccgtcatgatgtcttcaaattgtttttccggatcggtatgaaagctcgtaacatcaatgatatcgtcaaaagtgcatcccgcagcagccagggtcgcatgcaaattatcaaatgccagtctgacttgttgctgaaaatcgggttctggtgttccgtcctctcgacttcctacttgcccggaaacaaacagcaaatcgccggaacgaatagccgcagaataacgatgctcagcatacagtgaatgtcggccagcagggaaaacagcggttctttctaccatttggttatcctcaagatttacgacatgaacagaagatttctctttaccgggagccgcttttagcggacgacgtgagtaaacaaaacccagacatcatggataatggctgggcttaattgagcgtagtcggttatgcgccaaacgcgccatcaatggtatgcatcgcgccggtaacaaaactggcttctggccctgctaaccatgcgaccataccagcgacctcttccggttgcccatgtcttttgatagccatcaaactatgcaacatatcgcgcattggcccgttggcgggattagcgtcggtatcaattggccctggctggacgacgttaatggtgatcccacgcggtccaaaatcacgggccagcccgcgcgccatgccttgcagggcagatttgctggcggcataagcagccatgcctgcaacaggcatacgatcgccattcacggagccgatgattaagatgcgcccgccttcgggcatctgccgggcggcttcaacagaggcatgataaggagcatgaatattgattttgaaaaggcgatcaatatcgtcggcatttaattccagggcatcgccaaagacgccaatacctgcatttaccaccaggatatccaatgcgccgctcttacgaacgacatcaatgacagcgtctctgtcagcactatctgtaaatactgctgtcgctccagtctcttgtgccagatgttcagcggcatctttcgaccccgcataggtgaatcgtacattggccccatcagtgacgaaacgacgtacgatagcggcaccgattccacgactgccaccgaggatgagaactgtcttacctgtaaaagcgcccataaggactccttgatttattatgtgacatgcattacaaaactgttttaactttctgtcaacaagttttgtaatggtcactaaaaaacaatctcgcgttccaggtcgtcccagacgtttcgctcctgagcaggcagtctctgcggcaaaagtgctttttcaccaaaaaggtttcgatgctgtcagtgttgctgaagttactgattatcttggtattaaccccccgagcctctacgcagcttttggcagtaaagttgggttatttagccgtgtactcaatgaatatgtcggtacggaagctattccgcttgccgatattcttcgtgatgatcgtccggtaggcgagtgcctggttgaggtattaaaagaagcggcgcgcagatatagccaaaacggcggctgcgctggctgtatggttcttgaaggtattcatagtcatgatccacaagcgcgtgatattgccgttcaatattatcacgccgcagaaacgaccatttatgactatatcgccaggcggcatccacaaagcgcacaatgtgtgactgattttatgagtaccgtgatgtcagggctttctgcgaaggcacgggaggggcactccatcgaacaactctgtgcaacagctgcactggcgggggaagcgataaaaactattctcaaggagtgatgctggccttgacccgaaaggcgggaacgcgcctgccgataagttgtgataagacaataattcacgcgttaaggctagcggaattgatcatcttttcgtataacggtggaaatgaaacattgttttaattaaggagtggaaaagatgatcatcggaaatattcataatcttcagccgtggctaccccaggagttacgccaggcgattgagcatatcaaagcgcacgttacggcagaaacgccaaagggtaagcacgatatcgaaggcaatcgtctgttttatcttatctcggaagatatgaccgagccgtacgaagctcgccgtgcggagtatcatgcccgctatctcgacattcagattgtgttaaaaggtcaggaaggcatgaccttcagcacgcaacctgcaggcacgccggataccgactggttagctgataaagacatcgcatttttgccggaaggcgttgatgagaaaacagttatccttaatgaaggtgattttgttgtgttttatccgggggaagtgcataaaccgctgtgcgcagtgggcgcgccagcccaggttcgcaaagcagtagtgaagatgctgatggcgtgatgacttttcgccgtaaataactccaggtttacggcgagtttgtgaaaagagcgttttttgatatttttttgtgagtagaatttgtaatgcttagacgttcttattaactcaaggagtccgtcatggcaaaaatatcagatttgaattgttatcaacacatggcatcagccgacaatgttaaaccaaaaaatgaagtcttaaatacctggtgtgtgggaatgaatgattttgctcgtaatgccgaggggcaggatagcagaaggaatattctatctcctggagcatttttggagtttttggcaaaaatatttaccctgggttatgtggattttagcaaacgctccaacgaagcgggtagaaatatgatggctcatattgagtcctcatcttatatcaaaaataatgatggcagtgaaataatgaattttgttatgaataatcctgaaggtgagcgtgcggattcatctaaggtgattatagaaatttcactttctactaccactactatggggactcgtcaaggacatacagccattatatttccacaatctgattttttgagttttcgttatgaaggtaagtcttttgaaagaaaagatgatagttcattacatctgattactaacaaggttctggcgtgttaccaacgcgaagctaacaagaatatggcgcttctattaaataatcatcagttgaactggaaggacgcaattgattataacgagttattagaaaagccattagccagtacattagaaaaaataaagaaagaacatctgctattaatgcctcatgtatgtgatgacacgattccatacttactaggcgaaggtggtatacttgaagaaataaatgatctgaaagcgttacatgataccagaattgctagtggtacagaaggtaatgatgaaattaataacatcaaaattaacctgtctaatattcttattgattccttagatgatgcaaaagttaatctcgaaaaggtcatcgattcgatgttgaagacttttttaaaattgccatatattaatgatgtaaaaattctggagtggtgttttaatcaaagtatgcaatattctgatgatactacaaagataaagcatgcccgctccgtgatcgatcatattgattttaactgcgatcagtctaaaatagctgagacattatttttcaacctcaataaagaaccctataaaaacagccctgagttacaggaattgatttgggagaagttggttgtatatgtcaatgattttaacttaagcaatcaagaaaaatcacgcttaatactaaggttatttgatgatgttaagttgctatttaatgaagtgcctgtcagcattttagtaaatgatatttttttgaaggattttttcatgaagcaacctgattttgcgaagtggtacttctatcaattaattaagaagtatgagggcgaacagctgtatcttaatgagttaggatatgtttatggtaatgaagaaaaaacaaatgaaattgtaaaaaaacttccgggttatgtcattaagatttttgaagaaaagatgggtaatgaattaaaaattagaacaagaatgatgaaaatcctccggaatggcaaaatcaatatatataaatatatgaatatatgaatatatgaatatattaataatgaacagttgggaaaattaaatcctccggaaaatttacgtatagcaatagaaaaatttggctggaagaaaaaaactatcactgcataaaataatgtgatgccgggatgtttttgtatttcccggcatcttgatagagatattaattatttaatttactgagcgtcgcgaccatcaccgctttgatagtatgcatgcggttttccgcctgatcaaatacaatgctggcggcagattcgaagacctcatcagtcacttccattccgccatgtaggccaaactcttccgccattttcttgccaagcgtcgtttggtcgtcatgaaacgcgggcaggcagtggaggaatttgacctccgggttaccggtcaactgcatcatcttgctgttcacttgataatcacgcagcaatgcaatgcgttcagcccatttctcttttgcttcacccatcgacacccatacatcggtatagataaagtcagcaccttcaactcctttagctacatcttccgtcagcgtaatattcccgccattttgctgtgccagagcgcggcattccgtaaccagcgcagcttccggccagcatgcctgtggcgcgaccagacgcaaatccagaccggtaagcgccgcagcttcgagcatcgaattgcccatgttgttacgtgcgtcacctgcatagaccagcgtcatttcgttgaatgctttaccgggtaaatgctcctgcatggtgaggagatccgccagcaactgcgtggggtgaaactcattggtcaggccgttccataccggcacgccagcgtattccgccagtgtttcgacaatctcctgaccatagccgcgatactgaataccgtcatacatgcgacccagcacgcgggcagtgtctttaatcgactctttatgaccaatctgactgccgcttgggccgagataagtaacgtgagcaccctggtcatatgcggcaacttcgaaagagcatcgggtacgggtcgagtctttttcgaagatgagcgcgatgtttttaccagtgagtttggcttcttctttgccgcttttcttatcggctttcagcttcgcggctaactgcagcaggctgttgagttcagctggcgtgaaatcgagtaatttcaggaaatgcttatgataaaacccggacatagatccctcctgtggctaacacctcaatgaattaaaattcaatttatatggatgattattcatttgcaagtctaaagcataaatctttgtcacaaaggtggaggcaatgtcagtggtgtgtgacaataagagtatcggcaggacattaagaggaatgagccatggcaaacccggaacaactggaagaacagcgtgaagaaacacgtttgattattgaagaattactggaagatggcagcgatccggacgcgctgtataccatcgaacaccatctttccgcagacgatctggaaaccctggaaaaagcagcagttgaagcgtttaaactcggttacgaagtgaccgatccagaagagctggaagttgaagatggtgatatcgtgatttgctgcgacatcctcagcgagtgcgcgttgaatgccgatctgatcgatgcccaggttgaacaactgatgacgctggcggagaaatttgacgttgagtacgacggttggggcacttactttgaagatcccaacggcgaagacggcgacgatgaagattttgtcgatgaagacgatgacggggttcgccactaattaattgattaaaatgcccgatagcacacactagcgggcatttttttagagttcgcgtagcatccgcacttcacaatcgacatggcccgtgcagccaagcgcatagtcgatatgctcaaagcccaaatgctcataaagcgcaatggcttcctttaaaaaagcggtcgtttccagatagcagcgtttgaagcccatctctcgtgcctgctccatcgccattaaggccagttttttcgccagccctttaccgcgaatagccggaagaaaatacatcttttgcagttcgcaaatgtccgattcactacctgctaatggcgcaatcccaccgccgccgaccacttcaccctcgtactcaaccacccaatatgcatgacccggctgactatacacttgatacagctcgtcaagattcggatcggcgacggtgtagcctttatcagcggtaagaccgtattcggcggatacctgacgaatgacgcgggcaatagcaggattatcctgcagcgtcaggcgacgcattacaggtgattgcggcgcaatgttattcatagtttaacccaataaaaataaagtaattatacatttgtttaataccactctcttcttacgtgcgcaagcatcttataaagcaataaagtttttgccagcctattactgataagagtattgtaacgtggcagaacattttactgtctgtatctataacttatatcaatggattttttaattcagggaatttttatggctcaagttattaatgaaatggatgttccgtcccattcgtttgtttttcatggtacaggtgagagatattttcttatttgtgtggtgaatgtgttgttaacgattataacgctaggtatctatttaccatgggcattaatgaaatgtaagcgttatctctatgctaatatggaggttaacggacaacgattttcttatgggattaccggtgggaatgtttttgttagttgtcttgtttttgtttttttctatttcgcaatcttaatgacagtgtcagcagatatgccgcttattggctgtgttttgactttgtcactgttggttttgcttatatttatggcagcaaaaggactgcgttatcaggccttgatgactagtctcaacggcgtaagatttagttttaattgctctatgaaagggttctggtgagtaacctttttcttgccgattttaatggccattgggatggggactgttttctttatctcgacaaagatgctacatgccaatagttcaagtagtgttattatatctgtggttctgatggcaatagttggtattgtttccattggtatttttaatggtactttatatagcctggtaatgagttttctctggagcaataccagtttcggtatacatcgtttcaaggtgaaattagatactgcgtattgtataaaatatgccatcctcgcatttttagctttattaccttttctcgctgttgctggttatattatcttcgatcaaatattaaatgcgtatgatagttctgtgtatgcaaatgatgatattgagaatttacagcaatttatggaaatgcaacgtaaaatgataatcgcgcagttaatctattattttgggattgctgttagcaccagttatttaacggtgtcgttgcgaaatcattttatgagcaacctgtcactgaatgatgggcgtattcgttttcgctcaactttaacttaccacggtatgctttatcgcatgtgtgcgttggtagtgatatccgggattacgggcggtctggcttatccactgctgaaaatatggatgattgactggcaggcaaaaaatacgtatttgctgggcgatttggatgaccttcctttaatcaataaagaagaacaaccagataaaggcttcttagccagtatttcacggggaattatgccttctttaccatttctgtaagagataaaaaaggccggagcattctccggccttcgttttcatcacggtgttgattacagcgcggcgataacagcctgctgttcaatcagcttcgctttcgcttccgcatagccttccagcttctcacgctctttcgcgatgaccgcttccggtgcgcgggcgacaaagccttcattcgccagcttgttctcgatacggctgatttcgccttcgatcttcgccacttctttcgccagacgcgccagctcatcttctttgttgatgaggccagccatcgggatcagcagctctgcgccgtcgatgatcttcgtaacggaaaccggacctttgtcatcggcaggcagcacggtgatgctttccagacgcgccagggtttgcaggaagccacggttttcatttacgcgacgttctgcatccgcgctgcaaccacgcagcagcagctccagcggtttgcccggcgcgatgttcatttctgcacggatgttacgtaccgcaacgatcgcctgtttcagccattcggtgtcggccagtgcggcttcatcaacctgagatgcatcgtactgcgggaacggctgcagcatgatggtgtcggcagtgataccgcaaagtactttcacacgctgccagatggtttcggtgatgaacggaatgatcggatgcgcgaggcgcagcagaccttccagtacagtcaccagcgtatggcgagtaccgcgcagttcggcttcggtgccaccgttcattaccggcttggtcagctccagataccagtcacagaactggttccaggtgaactcatacagaatgcctgcagcgatatcgaagcggaagctgtccagcgcttcgcggtacgctttgatggtctggttgaactctgccagaatccagcggtccgccagcgacagtgtcatttcgccgccgttaaagccgcaatcctgaccttctgtgttcatcagcacaaagcggctggcgttccacagcttgttacagaagttacggtaaccttccaggcgcttcatatcccagttgatgtcacgaccggtagacgccagcgccgccagggtgaagcgcagggcatcggtgccgtgcggctcaatgccgttcgggaactgtttctcggtgcgcttacggattttgtccgccagctgcggctgcatcatattgccggtacgtttttccagcagttctggcagcgaaataccgtcaaccatatccagcgggtcgataacgttacccttggatttggacattttctggccttcgtcgtcacgaatcagaccggtcatgtaaacagtgtggaacggcacctgcggtttgccattttcatctttgatgaagtgcatggtcatcatgatcatgcgggcaatccagaagaagatgatgtcgaagccggataccatcacgctggttgggtggaactgacgcagggcgtcggtgttttccggccagccaagggtagagaaggtccacagcgcagaagagaaccaggtgtcgagaacgtcttcgtcctgacgcagggcaacgtcggcaccgaggttattttccttgcgcacttcttcttcgttgcggccaacataaacattacccgcttcgtcataccatgccgggatacggtgaccccaccacagctgacgagagatacaccagtcctgaatatcgcgcatccaggagaaatacatgttttcgtactgcttcggtacgaactgaatgtcgccgttctcaaccgcttcaaccgccggtttcgccagtacatcggcacgcacgtaccactggtcggtcagcattggttcgataactacgccgccacggtcgccgtaaggaacggtcaggtcgtgcggtttaatttcttccagcaggccgagtgcgtcaaccgcagcaacgactgctttacgtgcggcaaaacgctccagtttctggaattctgccgggatctcgctggaataaacgtcagattcgttacctttggtatcgaacacctgggcgctttcacggatatcgccgtcaaaggtcaggatgttgatcatcggcagggcgtgacgtttaccgacttcatagtcgttaaagtcgtgcgccggggtgatcttcacgcagccggtgcctttttccatgtcggcgtgttcgtcgccaacgatcggaatacgacggttaaccagcggtagaatgacatatttgccaatcaggtctttgtaacgcggatcttccgggttaacggctacaccggtatcgcccagcagggtttccggacgggtagtcgcaaccaccaggtaatctttaccgtctgcggttttcgcaccgtcagccagcggatagcggatgtgccacatcgaacctttcgattcgcggttttccacttccaggtcagagatagcggtgcgcagtttcgggtcccagtttaccaggcgtttgccacggtaaatcaggtcttctttatacagacgaacgaaaacttctttcaccgcattggacaggccttcgtccatcgtgaagcgttcacgctcccagtcgacggagttgccgagacggcgcatctgacgggtaatcgtgccgccggattccgctttccattcccagattttgtcgatgaaagcttcgcggccgtagtcgtgacgggttttaccttcttctgcggcaatcttgcgctcaacgaccatctgggtagcgatcccggcgtggtcagtaccgacctgccacagggtgtttttgccctgcatgcgctgatagcggatcatggtatccatgatggtttgctggaaggcgtgacccatatgcaaactgccggtgacgttcggcggcgggatcatgatgcagaaactttcctggctttcatcgccattaggcttaaagtagccctgcttttcccagtgctcgtaaagcggctgttcgatatcttgtgggttatatgtcttttccattatttccaggttgccgtattcaggttgaaaccagccacgcggtaggctttatagcgttcgcgcgccagttgtttcagagaatcttcataaggaacgaagtctaccacttctgtgaaagcggtggcaaaatctgcaaagcatgttcgcagactaatcaatatatcgcgcgggctgctgctgcgtttttgcggccaggcgatctccaccggcgcaccgccacgcggtccttctcccgctaaattatgcggaacaaagctttctgccggacgcgcccacagggcttcatccagccggtaagcctgcttttcatcttcacaggcgatgagcacgcgcttaccgctgcgccaacgttctgcggcaatttcacacaccagttgctcaacggcgcttaagccatcgacggtggtgtcattgtccagaaggtagaacgtcgcgtttttcataaatggggcttcttgtggtggatttaaatacgcatcaggtatacaccgcagcgcctgatgcgacgctgttgtgtcttatcaggcctacgagttcagtgctgtgtgtaggtcggataaggcgctcacgccgcatccgacaataacagcattgcctgatgcgacgctgttgtgtcttatcaggcctacgagttcggtgctgtgtaggtcggataaggcgttcatgccgcatccgacaataacagcattgcctgatgcgacgcttgcgcgtcttatcaggcctacgagttcagtgctgtgtaggtcggataaggcgttcacgccgcatccggcaataacagccttgcctgacgcaattactcttcgccgttaaacccagcgcggttcaacaggaactgtgccagcaacgctaccggacgaccggttgcgccttttgctttaccagaacgccaggcggttccggcgatatccaggtgcgcccagttgtacttacgggtaaagcgcgacaggaagcaacctgcggtaatcgccccaccaggacgaccgccaatgttcgccatatcggcaaaattggactccagctgttcctgatactcgtcacccagcggtaagcgccatgcgcggtcaccggattgttcagacgcggcaatcagttcatgggccagcggattatggttcgccatcagaccggtaatgtgatgacccagcgcgatcacgcaggcaccggtcagcgtcgccacgtcaatcaccgcttccggctcaaaacgctcaacgtaagttaacacgtcgcacagtaccaggcggccttcagcgtcagtattcagcacttcaacggtttgaccggacatggtggttaacacatcgcccggacgataggctcgtccgccaggcatgttttcgcagcctgccaacacgccgataacgttaatcggcagttgtagctccgcgaccatacgcatcacaccgtaaaccgctgccgcaccgcacatatcgtacttcatctcatccatgccttctgaaggcttgatcgagataccgccggagtcgaaggttaaacctttacccaccagcacgattgggcgtgcatcttccgacgcgttgcctttgtactcaatcaccgacatcagcgattcgttctgcgaaccctgaccgaccgccagataggaatgcatccccagctctttcatctgctgttcgccgataacgcgggtgataacattcttgctgtagctgtcagccagctggcgcgcttgtgaagcgaggtaagcggcgttacagatattcggcggcatattgccaagatcctttgctgctttaatcccggcggcaatcgccagaccgtgctggatcgcgcgctcaccgctggtcagttcacggcgggtcggcacgttgaacaccattttacgcagcggacgacgcggttcgctcttgttcgttttcagctgatcgaaactgtagagcgtttcttttgccgtctcgacagcctgacgcactttccagtagttgttacggcctttaacgtgcagttcagtcagaaagcagaccgcttccattgagccagtatcattcagcgtattaatggttttctgaataacctgcttgtactgacgctcatccagctcacgttctttgccgcaaccaataaggagaattcgctcggaaagtacattcggaacatggtgcagcaacaatgtctgccccggttttccttccagttcgccccgacgtagcagggcgctgatgtacccatcgctgattttatcgagctgttctgcaatcggagaaaggcgacgtggttcgaagacgcccacgacgatgcaggcactccgctgtttctccgggctaccgctttttacactaaactccatgcactacgctcctgaatcttaaagacaacggcggtggctacagatagaattgcaagctttcgtaactcatgtccgctgttgcgatgacttcgtgttaatcttaacgttattacggcattggcacgtcagaacaaaatctgagaggtgaatccgttgagtataattatcttagcgacgatttcgacgactcaagagaataaatgacgtttaagccatgaaacaagctaaaatcctgcaaaagacgagtttttacgggcgtatttaaagtgataatcataagatatctggtgcgggagacgctcaaaagccagctggcgatactcttcatcttgcttttgatcttcttctgtcaaaagttagtgaggatcctcggcgcagcggttgacggcgatattccggcgaatctggtgctctcccttctcgggttgggcgtgccggaaatggcgcagcttatcctgccattaagcctgttcctcgggctgctgatgacgctgggcaaactgtataccgaaagtgaaattacggtaatgcatgcctgcggcctgagcaaagcggttctggtgaaagcggcaatgatccttgcggtattcacggcaatcgtcgcggcggttaacgtgatgtgggcgggaccgtggtcatcgcgtcatcaggatgaagtgttagcagaagcgaaagcgaaccctggcatggcggcgctggcgcaagggcaattccagcaagcgactaatggcagctcggtgctgttcatcgaaagcgttgacggcagcgatttcaaagatgtgttcctcgcacaaattcgaccaaaaggtaatgcacgtccttctgtggtggtggccgattccggacatttaacccagctgcgcgacggctcccaggtcgtcactctcaaccagggaacgcgcttcgaaggcactgcactgttacgtgatttccgcattacggatttccaggattatcaggcgatcattggtcaccaggcggtggcgctcgacccgaacgataccgaccagatggacatgtgcacattgtggaacactgacaccgatcgtgctcgcgcagaactgaactggcgtatcacgttggtattcaccgtgtttatgatggcacttatggtcgtaccgctgagcgtggttaacccacgtcagggacgcgtactgtcgatgctgccagccatgctgctgtatctacttttcttcctgatccagacctccctgaaatcgaacggcggtaaaggtaagctggacccgacgctgtggatgtggaccgttaacctgatttatctggctttggcgattgttctcaacctttgggacaccgtgccggtccgccgcctgcgcgccagtttttcgcgtaaaggagcggtgtgatgcaaccttttggcgtacttgaccgctatatcggtaaaactattttcaccaccatcatgatgacgctgttcatgctggtgtcgctgtcgggcattatcaaatttgtcgatcagttgaaaaaagccgggcaggggagttacgacgcgttaggcgcaggaatgtataccttgctgagcgtgccgaaagatgtgcaaatcttcttcccgatggcggctctgcttggggcgttgcttggtcttgggatgctggcgcagcgcagcgaactggtggtgatgcaggcttctggttttacccgtatgcaggtggcgctgtcggtgatgaaaaccgccattccgctggtcttgctgacgatggcgattggcgaatgggtcgcgccgcagggcgagcagatggcgcgtaactaccgtgcgcaggcgatgtacggcggctcgttgctctctacccagcaaggcttatgggcgaaagatggcaacaacttcgtctacattgagcgggttaaaggtgacgaagagttaggtggcatcagcatttatgcctttaacgaaaatcgtcgtctgcaatccgtacgctatgccgctactgcgaagtttgacccggaacataaagtctggcgtctgtcgcaggttgatgaatctgatctgaccaatccgaaacagatcaccggttcgcagacggtgagcggcacctggaaaaccaacctcacgccagacaaactgggcgtggtggcgctggacccggatgcactctcaatcagcggtttgcacaactacgtgaagtatctgaagtcgagcggtcaggatgccggacgttatcagctcaatatgtggagcaaaatcttccagccgctatccgtggcggtgatgatgctgatggcgctgtcgttcatctttggcccactgcgtagcgtaccgatgggcgtgcgtgtggtcaccggtatcagcttcggttttgtcttctacgtactggaccagatcttcggcccgctgacgttggtttacggcatcccgccgattatcggcgcactgttgccaagcgccagcttcttcttaatcagcctgtggctgttaatgagaaaatcgtaaccaagcaagggagcgaaagctccctttcacattgttgataaagtcaaatacgagttcgatcggtcccctcgcccctttggggagagggttagggtgagggggacagatcgcgcctgacttaccttcttctccctcccagcaaactccccaacatcccgcgtacaatctgattcgtcacctggcgagcggcgcttttggccattgtctgcaccacaccatctttcttcccgccgcgtggtccggtagtgccgaacaaaatatccttcaatccaccaagaatgccgtcatctaccgctatctctttccctttcgctggaggattattttgctgttcaatactcgcctgtacgcctttttgcaacatctcataggcggattcccggtccacgtcatcctcgtacttgccatacaccggggagtggttaatcaagccattgcgctcatcttccgtcaccggtcccatccgcgaacaaggcgcaatcaccatcgcccgttccaccacagaaggacttccttttgcatcgagaaacgagattaacgcctcgccggtccccagttcctggattgccttttcggtatcaaacgccggattggcccgcatggtttgcgccgcagcttttaccgctttctgatcttttggcgtaaaagcccgcaaagcgtgctgaacgcgattaccgagctggccgagcacattatccggaatatcagacgggttttgcgaaacgaaccagacgcccacgccttttgagcgaataagccttatcacctgctcaatcttatccagcagtacctgcggtgcatcgttaaacagcagatgtgcttcgtcgaagaaaaacaccagttttggcttctccagatcgcccgcttccggcaattgttcatacaactctgaaatcatccacagcaggctggcggcgtacagtttcggcatctgataaagcttctcggcgctgaggatattaataacgcctttaccgttggcatcggtgcgcatcaagtctttgatatccagcatcggctcaccaaagaagtgtgctgcgccttgctgttccagcgacaacagcccgcgctggatggcaccaaccgatgcgctactgatatttccgtactgattctggaaagatttggcgttatcgccgatgtactgggtaatcgcccgcagatctttaaagtcgagcagtaacagcccctgatcgtcagcaattcggaagatgatattcagcacgccagattgcacatcgttgagattcaacagccgcgccagcaacagcggccccagatccgaaaccgtcgcccgcaccggatggcctttctcgccaaagatatcccacaccaccaccggattagcatgcggttgccagtcatttacgccgatatttttaagccttgcgagcagtttttccgacgccgttcctgcctgcgcgataccggtcagatcgcctttcacatcggccataaacaccggcacgccgatttccgatagagactccgccagtttttgcagcgtgacagttttacccgtccccgttgcgccagtaatcagcccgtgacggttagccattcccggcagtaaaaacagttctgtgtccggcgtgcgggcaattaacaggggttcgctcatgagatttcctccagtttcctgcctggagtataggcaacggctgtgcactcttcaccgctaaattcagcagattgcgagacgccttccaaagagatttaagtgccgggcgacaggctcccggcaaagggatcagaagtcggctttcaggaccacgcggtagcgcgctttaccatcgcgtacatgctggatggcgtcgttaattttcgacatcgggaacagttcggtggtcggcgcaaccttgctgcgggcggcaaaacgcatcagcttacgcagctcataaggcgtgccggtagcagaaccagagatgctgcggtcgcccgcaattaacgtaaaggccggaacagacagcggcgtgagaaccgcaccgaccgtatggaaattaccgccataggtcagcgcctcaaaataaggctgccagtcgaggctgacgttcacagtattgataatgagatcaaactgccccgacagggctttcagtgcctgcggatcgcggctattcaccactttatcggtacccatcgccagtacttcctgctctttcgccggattagaactaaaggccgtcacctcgcatcccattgcgtgcagaagttttatagcgatatgccccagcccgccaataccaattaccccaacgcggctggtagcagtgatatggtgcatcaacagtggtttaaagaccgtgataccgccgcacaacagcggcccggcggactcgatatcaatattttctggcagtggaatcacccattgccagtccgcacgcaacttctcggcaaagccaccgcgattcataatcgtcggcaccgcaccttgctcgcagttgatctgattaccgctaatacaggtgtcgcagtgaccacagctacgcgccgtccagccaatcccgacacgctgaccgacctgcaaacctttatcctgcgcggcgctcccgagtgccaccacgcgcccaatcacctcatgcccggcaaccagcggatattgtgaaaatccccattcgttatcgatcatcgacagatcggaatgacaaatcccgcagtaatccacctgcacttcaacatcttgtggcttcagctcaccgggatcgtactcataaacttccagttcgccgcccgcttcttttgcggcatagctttttatcatcgacatttttgggtccttctctggtgttgtttgggaagtgtagagcatggcagggcggggtgcctggagtgtgacaaaggttacatatcgctgagtgtaatgctgaaaatttcagcacttagcgaggtgggtgcaagctggcgcttgcatggtggcgtgcgacaggtataatccacaacgttttccgcatacctcttcagtgccgaagtggcgaaatcggtagacgcagttgattcaaaatcaaccgtagaaatacgtgccggttcgagtccggccttcggcaccaaaagtatgtaaatagacctcaactgaggtctttttttatgcctgaaatccagtgtttatctacctttcccgctatattaactctctcaaggtcaaccgatatcaacgtacatctaccaacatatgttggtacagatgatggtatttccggttcgataatgcttgtaccaacagggagggaatacgcatggcattaacagatatcaaagtcagagcagccaagccaacggataagcaatataagctgactgatggtggcggtatgcatctgcttgtccatccaaatggttctaagtactggcgtttgcagtaccgttatgagggaaagcaaaaaatgctggcacttggggtttatcctgaaatcacactagcggatgccagagtacgtcgtgacgaggcgcgtaagctgcttgcgaatggcgtcgatccgggagacaaaaagaaaaatgataaggttgaacagagtaaagcacgaacctttaaagaagtcgcgattgagtggcatggcaccaataaaaagtggtctgaagatcacgcccatcgtgtgctaaaaagtctggaagataatctttttgcagcgcttggtgaacgtaatatcgctgagttaaaaactcgagatttattagcacccattaaggccgtagaaatgtctggacgtcttgaagtggccgctcgtcttcagcagcgcactacagccatcatgcgctatgcagtgcaaagtgggttaattgattataacccggcacaagagatggctggggcggttgcttcctgtaatcgacaacatcgtcccgcgcttgaattaaagcgcatccctgagttgcttacaaaaatagatagctatactggtaggccgctaacccgatgggcgacagaactctctttgctgatctttattcggtccagtgagctgcgttttgctcgttggtcagagatcgatttcgaagcgtctatatggactatcccaccggagcgggagcctattcctggagtgaaacattcccatagaggctcaaaaatgcgtacaacgcatctagtgcctctttcaacgcaagctcttgcaattttaaagcagataaaacagttttgtggggcccatgacttgatatttattggtgatcacgattcgcacaaacccatgagtgagaatacggtaaatagtgcgttacgggtcatggggtatgatacaaaagtagaggtttgtggtcatggctttcgaacaatggcctgtagttcattggtcgaatcaggtttgtggtctcgtgatgctgttgaacgtcagatgagccacatggagcgaaattcagtgagggccgcgtatatccataaagcagagcatctggaagaacgccgcttgatgctacaatggtgggccgattttctggatgcaaacagagaaaaatttatcagtccatttgaatatgcaaagattaataatccattaaaacagtaatcatcccgggcaaatgcccgggaacttactccatgaatattttctttgttaaaaaggcaaaacgatattaactgatgtattaaatgtttaccggattgctccctgcaggtggattatcagaatccgcagttattcgttatttatatatattcaataaaaagaaacatcataaaaaatcccgcacccacagggtgatgcgggataactgacgtaaggaatgctgccgggatttggtggtcccttgtgctgatatgaatacaggttctattctatacagaatccttttcagtacaagagactgtattacagtttgccatatatgattacctgtggtccggaagaataagtggctgcggtttcagactgtctgccggcacatttttctctccgttaaaaaccataacgggttcattatcttcgtctgtcagcggattgaatggcggtatattttcggtacgaataccggtcagccactgaaaaatgcctgcgaaattacgggcactgattttcctgctgacggactgatgagacgtgatgtcactggcggtaataatcaggggaacgctgtagcccccctgcacatgaccatcatgatgaacaggattagcactgtcgctgaccgacagcccatggtcagaaaagtaaagcattgcaaagtgacgggaatgccggcgaaggataccatcaagctgaccgagaaagttatccagtttactgatgctggcgaggtaacaggcaatctttcggggatactgctccaggtaataattcggccaggagttaagtcggtcacacggattcggatgagagccaatcatgtgcaggaaaatcaccttcggcgaggatttatccgccagcgcacgttctgtttcctgtaacaacaacatgtcatccgttttacgggaagcgaagctgcctttcttgaggaaaacggtatgctccgcatcagaagcaataacagagatgcgtgtgtcatgctctcccagttttccctgattggatatccaccatgtgctgtatcctgcttttgctgccagcgccaccacgttgttgccggagtcagggttctgctcatagtcataaatcagtgtccggctcagggaaggtacggtactggctgctgtcgatgtatagccgtcaataaataaaccgggagcagtattcagccacggcgtggttggcacgggatagccatataccgacatataatccctgcgcacactctcaccagtaacgataacaatcgtgtcatacaacggcacacccggcaggattttccagttatcagccccgtgctgactcagttgtttataacgctgcatttcacgcaatgtgtcagttgtccccacaacagttcctttaaccatccgcaacggccagctgtttacagagcataatacgaatagcagcagtgccagccagttacggtgaccgcggtggtgtgtccgccagaaaatcaccatgaattgtagtggcacactaaatttggccacctgatgaaaggtgatattctcaccacaacacaaaacaggtgacttaatgaacaagaaaaccaaacgaaccttcacccctgagttcaggctggaatgtgcacagctgattgttgataagggctactcatatcgacaggccagtgaagcgatgaatgtcggttcaaccacgcttgagagctgggtacgccagctcaggcgagagcgccagggtattacgccctctgccacacccattactccagaccagcaacgtatccgcgagctggaaaagcaagttcgccgtctggaggaacaaaatacgatattaaaaaaggctaccgcgctcttaatgtccgactcgctgaacggttcacgatagccgccagactaagtgacagccacacggttgtcagcctgtgttctgctctggaaatacaccgcagcagttaccggtactggcgaaaacgacgcgatacggttaattcggctcgcgtcaggttgtgcagcgaaatacgccgggcgtggaaccaaagtcggggctctgcgggcgcgcgcactctggctgaaatgctgactcaaaacggcgtcccgatgagccgttaccgtgccggacgtctgatgaaatatctgaacctgagcagttgtcagcccggaaaacatcagtataaaaatgcccgtcaggagcataccagcctgccgaatctgcttgagcgtcagttcgcagtaccggagccagaccgggtatggtgtggagatattacgtatctctgggcaggaaatcgctggtgctatctggcggttgttatggatctttttgcccgcagggttatcggctggagtctgtcagcgcatgccgataccgcactgataagcagtgccctgcggatggcctatgagacgcgtggccaaccccgggatgtcgtgttccatagcgaccagggaagccagtatacaggccttaaatatcaacaacttctctggcgttgcagaataaatcaaagcgtcagtcggcggggaaactgctgggataacagccccatggaacgcttcttccgcagtctgaaaacagaatgggtgccaacgaatggttacgcaggcaaggacgaggcccggcagcaaattaatgattacatattgaactactacaacagcgtcagacctcaccattataacggtgggctgacgccggaagagtcagagaacagataccatttttactgtaaaaccgtggccaatattacttgaccactacaaataccagaatcgcggcactgaccagaaaatgataaacaggaatcatcccggtaaactctgcagcctcatcagccgtggtctgcagcaacgcgacaataaaactgttgttgattttaccgtacgtcatacccgcaggcgcatacagtgcacaacagaacagaaataacagcgctgtaatggatgtgagggtatttctgtgtgcaaggagaagaaggagaaacagaagcagcacatttcctgtggcattcttctcagtgtatccgcatgcaattgtggttattgcagaaacaacaaaaaagaataaaaacaataaaatccggggtgtattgcccggacaaaacagttttctgatattcatcgaaatatatctgtaacattattataaagggaataagataataaaaaccataaatctcctgtgaaacaaataaccctgcggtatattactgcagggtatttctgtttagttgcagaagatatataaatatcttaattactgaatatgtgtaattatcgctcaggagcagtgtcgtcagaagttataagtcacaccaaacatgatgtcatgacttttaacatcagcctctgatttatatttatcgccccactcgtccttgtaactcacactgctgtcacctgcatcaagatagcgatagctgaggtccagagcgatatgcggagttacgtcatagcgaacaccggccccaatgctccatgcgaagttgttatcatatcccgagtaatgtaatgcagaaatatcacttacctcaccagattcattccaggaggtatcagtatatgtcaccttatgatgtacccgtgcataacccagtccaacagatacccatggcgtgaatgcactgctgtttctgaaatcataatacgtgttcaccatcagggtattcacactgagcctgttctgtgtgtcttcccgaccaccatcccccatcggagaatgccatgtatccagtgtataatgggagtccgcagctccgcggccatagaattccacttccgtgcgcaccggcacattgtagtgctgataaaaatcgtatcccaccgcaaggcctgcgccaaaaaccgtatcacttttgtcaccgcctttgtatttatccgcccatgccccttcaccatcaacgaaacgttggtctgaaagtgacataacagaagcaccggctttacgggtcacataaaagcctgttttgctctcatctgccagagccagggctgaaagcatacttaccattgtaaacgctgaagtcgaaaaatctttttcatttcaatcatctccgttggttcttaccctacccgataaataaggttgcctattttaaaaccactcaaaagacagggtaaaatggttacagccgatcaatgcgatcatatcgatcggtaaaatcgatcatatatgatgaagatttcttatcgaattcataaaaatagtgacaggtaactggcgttactggaacaatcagaaatggaagtttgggaaagtgccatagcactgcatcgtcgctgacatagaggaacagtgctttgttgataagctcctttatacggcaaccaatccatcggtagaaagatgaactacgtaatcacctggctcttactgatgaaatacagaagttaatgacataactgagctatgagccttgtacaacagcaattagaggctctcaaagcaatggaataacagaaaggttcatgaaaacgctgaagtgtaacaacatctgtataatgctcaaccagacaggctaatggcagcaaagaatcttacgaaggcgttcatgtactataacggatggcatccacatagtgcaccaaactaccgctcaccacaggaatatctgcggcagcggaccagtaatgggttaagtgataacagatgtctggaaatacaggggcaaatcccccacctgaacgccaataattctaacaaatactcgcaacacattcacttttaacaccctttctattaacaattacaggttattaaactttttgtgttcccgaaaataacgcaaccccacgctgccggcgacacacacatatcaaccgaccacttcaggggggttggtacatattcccgccactaacagaaaactcgtcaataaaaacctggctaaaacgacctccagcaagccattacatagtacccgggtttgataaagtccattctcaattgcaaaccacagggttcagttaaatattctcatgtattctgaatgactagttttgtaattatacgtaaaacaatgtcaactaactggtcaaccaataaaagcaagaggttgatcactttcatgacaacgtggaacgggtaatatctggaacaacatgtgaccttgtaagtctccttcttaaccatttgaggtatatatgaaatatataaaacactacagatggcaaatgattgttctcgtatgtttcattactattattaactatcttgaccgtaccgctcttggcgttgcggcaccaaccataatgtcagatttagggatctctaaagaacagtattcctggattgtaagtgtattccagctggcgtacacaataggtcaaccaattatggggttctttattgataatatcggccttaaattaggcttctttatctgtgcagttatctggggattagccacgatgggacacgccctgactggctcctggatgggactggcattcatgcgtggtatcatgggcgttagtgaagcttcagctattccggcgggcgtaaaaacagcctcaacatggtttccggcaaaagaacgaggcatcgcaactggtgtatttaacatggggacatcatttggtgccatgttagccccgcctttgattgcatggtgcattatgttccacagctggcaatttgcttttattgtggctggtatactggctgtaatagccgcatttatctggctgattttctataaagatccaaaagatgcaaaacgctgatgaatcccctaatgattttggtaaaaatcattaagttaaggtggatacacatcttgtcatatgatcaaatggtttcgcgaaaaatcaataatcagacaacaagatgtgcgaactcgatattttacacgactctctttaccaattctgccccgaattacacttaaaacgactcaacagcttaacgttggcttgccacgcattacttgactgtaaaactctcactcttaccgaacttggccgtaacctgccaaccaaagcgagaacaaaacataacatcaaacgaatcgaccgattgttaggtaatcgtcacctccacaaagagcgactcgctgtataccgttggcatgctagctttatctgttcgggcaatacgatgcccattgtacttgttgactggtctgatattcgtgagcaaaaacgacttatggtattgcgagcttcagtcgcactacacggtcgttctgttactctttatgagaaagcgttcccgctttcagagcaatgttcaaagaaagctcatgaccaatttctagccgaccttgcgagcattctaccgagtaacaccacaccgctcattgtcagtgatgctggctttaaagtgccatggtataaatccgttgagaagctgggttggtactggttaagtcgagtaagaggaaaagtacaatatgcagacctaggagcggaaaactggaaacctatcagcaacttacatgatatgtcatctagtcactcaaagactttaggctataagaggctgactaaaagcaatccaatctcatgccaaattctattgtataaatctcgctctaaaggccgaaaaaatcagcgctcgacacggactcattgtcaccacccgtcacctaaaatctactcagcgtcggcaaaggagccatgggttctagcaactaacttacctgttgaaattcgaacacccaaacaacttgttaatatctattcgaagcgaatgcagattgaagaaaccttccgagacttgaaaagtcctgcctacggactaggcctacgccatagccgaacgagcagctcagagcgttttgatatcatgctgctaatcgccctgatgcttcaactaacatgttggcttgcgggcgttcatgctcagaaacaaggttgggacaagcacttccaggctaacacagtcagaaatcgaaacgtactctcaacagttcgcttaggcatggaagttttgcggcattctggctacacaataacaagggaagacttactcgtggctgcaaccctactagctcaaaatttattcacacatggttacgctttggggaaattatgaggggatctctcagtgcaaaacgcctctccccagaagaacgttcatatattgaaaatggtcaggaaaagcatctgaacaatgccaaaaaagaaaaaacatctgtaatcaacatcctgaaacaaagaaacttttggggaatcggtatttcccgctttttagctgacccggcatggggaactattaacttctgggtgcctgttttctttgtcgaaacactgcatttcagcctgaaagaaatcgccatgtttgtatggcttccattcctcatggctgatttaggatgccttgccagtggatttgttgcaaaattcttcaatgaaagaggaatttcattaataaattcacgacgtattacttttactattggtgcgatactgatgacgactatcggtctggtcagtatcatagaaaacccctatattgctgttttattaatcagtattggggggttctcacatcaattactttctacggttgctgcaactttaggtgcagacctgtttaaaaagaatgaagtcgcaacggctgtcggaatggccggggcatgtgcatggtctggccagctgatttttaatttattcattggtgcatttgtcagtatcattggctttgggccgttctttattgcactggcggtatttgacctgattggtgctgtagccttatggatactgataaaagacaacaaacagacagatgatcacagtcacaacaacaaactgatttcatcacactaaaacgaagtcattgtttaataaatttaaaccattatatatgaattttacactctgaacatggtaaccgatttagcactggcgcattaatttgcgcgaaggagacctcaaaatcccttatcgtgccttcatactgcagccggggtcagctgcagtttcagtgctttttttgatgcaaaaaacagctgttaaccatcaaaaaattaatatcttcagacagattgcctgtgatattccgttttatccggcactatgaagcaccaacgtcgggaattaaagaattccgccccggcgagtagtccccctcactaatatcactcttatctgtaaccccgaacggcttccataacaatataatccagtaccgcattaaactttccatctatcggcgtggttacccgaaaattatcttctggtcgtttttctttgaaagtaatgaagtggactaaattactccggtgtctcatttaaagctatttcgtaatgctttgtaattaaacacgttatggtttgcatcaaaaacatctgatttcccctgccagcgggtaatcacctcctctggtgttttcggttgagccggtctggttacgcccatccatgcattaatcagataatcattatacgcagtggaaaaaacactgttcaccgtctggcgatcgacatgctctcccagtgtcgggctgtaccagataaacatcggaacatgataagcctgctggctgggttttattccaccatgaaaataaacgtgttcttttgtcgggtcatactccagaccgtgatctgaaaaatacatgacggatgcccgacgcgtttccagcatggcgaaaacctgtcccaacaaactgtcggtataatgaatggaattatcgtagcagacttcttctgtatccaatggtttaaacacggctttatctctgggccagttactgcagactggctcatggctgcccgtcagatgcagaacaatcagtttcctgcaccccggattactgttcagtgcttcagccaggtgcgggagcagcaactcatcatatcctctgacataaattctgtttctggcccgcatggcgatactggccacagccgttccgttctgtcggaaagcggactgcgcactgagccaccaggtattgaaccctgcctgattcgccatgttgataatattatcggggtaatggcgaacatcatgatgcagcacagtatcagcagataatgccaacggtaccgcaagggcggtataaggtgccccgctgattgcctgagtgaacagtttcagtcgtgatttctgtttctgaagctctggagtggttgggcgcgaatacccgtaaatggacatgttatcagtccttgcagattcaccaatcaccagaacaaatacgtcagtgttgttatccgtaatcaccagatcgtagtgaggtatggtatcagcaatcgtcattaatctctgatgctcctttgcggccagtgcaaaatagttcagattaaagaaaggggtatatgtggcaaaccgggaagcgactatgtaaggatcaacttcatttatttgatactgtttcttcaacgcaaactgaaaggaagaatataacgttactgtaattaacaataaaaatgtaattaccgtgaccttttccgatggtaatgaggacgttttatttattgctgaacagaagaacaataaaaagaggataataaatgcgataacataaacaacatacatcctgaacattcttattacttcatcaggatctgtctgaaggatactgattgcaaaaccatcattaaatgttgtaccgaatgtacaccatgaatacaggctgatactgatatctaccgctgtcagtaatgtgaacggaaaggccagaataaaacgcagcgtaagcgatttcatcgccttaataataagaagcaccagggtaaagaataatatccggtaaatcagatgcgctcctgaggatacaaggagattagaaagggtaaagacaaccactgataacacgaggcgcttatcattgcaaatccgcggccagtgtatgaacggaagattaattttcataataattgaataaaagcgatatttctgtccggcactggtcgctgaacatgccgcgacaggtgaattcattattctgaataatcataaagccgccacaaatgtagcggcgtaaacaggagcgtcatgatgttttctttcgtgacagaagagaactgcacataccacccgcaatcattatcatcaggaataacatccccaggccaacgattactcttaatgccggatgaacccgatcggcgagaaaaaataactccatcccgaaaccaataacaagccaggccagcgccattccgacgagcccttttaacagcaatctcacgatcctctccttctgcgttcttaacgaaaatgccttacaataacagcagccggagaaagcaacgctggctgctgaacggaatgacattttactgttttatgttctctcagtttctgtcctgacgccgccattaatggcattacagtttattcagaataaggcatgcggcctggtttaatgcaataaactcctgccagctgtactgagactgataattcagtaaatactggtcttcaacccggcaaatctgtgggcgtttatcataaattgcacacaaatgagaatcagtctgatagtaacggcaaataccgtcaccacgatccagacattgcgtttcacccgccctgttgacatgacgacaacaggccccacactggttacagggaaatggagggtgtaatttcatcgcttatttaaccagtcacgaacagaagccacatttcctgactcaaacggcaacgcaatccctcgtcggcggacttcttctctcagcagaagtccgcgctctatctcactgtttacgctatccagatgaagtgaaaaatgatttaactcggcagcatcaacagaaaattccagtgcagtaagttccacaagatagcgatcaagttcagcattgactgcctgaaagtattccagtgaccgctggaatttgtccttaaatttgtccagaaatgcccatacccgctgcataacctcgctatattcgagataataattcatcaccagcccgagaatacctgtcgtcagcgcaccacaaaaggcagcaagctctgaaccaaatgggaaaataaggatctgcgccatcgcctcatttatcatcacccctccggcaacagccacacctgctgctatcagtttagtgaccgctttggctaactgccccggcgataatccctccggattaaataccaggactttaaaggcctgaacgagattgttccacatttccctgataagccggacaatcattctttccgttgtcaggaatatatttaacagcgttgtggtaatacctgacagtatccctccgatgacaccatctttaaaggcaattaaaaaagaactgaatttttcctgtactcgttcctggcaggcacgtaatgctgacgttatttcggacaggcatttgccggcgctgaatgagttccgttgctgcctgataatatgcgggattcgttccctcagttcgaaccagatctcggcaagaataagccccaacatctgtcgcgtccccatacgaaaaccggaattaagcgaagcactggcgacagcagtagcaaacttactactcaggtaatagctctgattaatcgtggcctcatatttttcccgggcatatttatcagccctttccatacgctcagtatctgcatcagctttttttctcagacttatcagacgtttcttttccttttctgtcagcgttgcctgagattcaagctctgctatctgccttaacgtatcttctctgtttttctgcagcgtgcaaataaacgcatccattgagtctgctttctttgatttattgagcgactcatgagtgaatgccagatttgaagcgtcatttgccagttctgcaccatcccgttcagcaagaattctccccggatcatcatgaatttctttagcggaaataatatgatccagattttttttgtcgtcagaagcaaacacctcgcctgtatatgcatcagtaagagtccctgcctgatgcgcacgctttccttcccggttcgtcgcgatatagttctcatggctgtggtaatgatgagaatcatattcgccacgaccttcataccgctgtcgctcagcctccgtggcataaatgccattacgcacattatggatagtgtcaacatcaccacccttacgatcatttagcaacagaaaatccagcccgaatgatgtaaccaggctcttcaccatggtctgatgtaactcttctgtccagtcaaatttttccacattcatgttatttcacttcttgtaaagccgggctttaacgcccggtaaatcattaactctgggatgaaaaatcatcaaatttcacaaccgaactggccagtacatcatccagctcatccttattaataacgttcattccattatcatccgtttccatttcaataacgttatcttttatcactgcctcaccattttcctgtttccgcggtttaaacagtggcgttgtaataatatccgtcataatagcggccagtgaatatccatggtcaataagcacaatgacttcatctgatacactgatatcctgttgttctgtaataacagaatgcatggatttaagcggctcaaaatagtgtttaataaatacagcatgcattctgttcagtgcagcgagaatttcatcaacgtattgattaacttttgcaaaatgctcccgggccagattcattttcttaactgcccgtgcaacatcgcaggcacactgatgggcattttcaagagctttcgtcgcatgtctgtcgtaagcccagcccgcaatggcaatcaacggtgcagccactgcggtgcctaataccattgcgccgccggccattcccatgccccctgcagccagtgagcccccaccaattgccgccatcgtcgcgttataagccgcggcaccagaaagcgctgcaatgggtgtacctgtagaagccgcagcaaatgccatcactccgctatacacagcaaaacccgcagcagccccggaaactccggcagcaacgaccgtactgagatattctgtcgctgaaatggccaggttctgaatcttattgatgttatgttgcgggacactcagtttcaggtctttattgccctctttttccagacgcgccaggagctcagcagcaatcctgtcgaactcactgaaatctttaccaatctcaagctctttatttccgagcgttgttaattttgatgatgtctgagcttcagcctgctcaaatttttctttatgctcctcgtaacgctcttttgctttttcgaggatatcctctgcttctgactttttttgatatccatcgtaagctttttttccgccgaatgccgcagcgccggcagccacacccaaaataataaaaggtaacgccattcttttcctcctgtacagattgctttatcatcagtcaactgaaatatttcaggaaacattctcagcagtaaggtattttcctaacattgttaacacggcttctttcagccatactggttcaataatttcaacattcggtagccagtataaaatcaacgggacaatttgatttttatgtgcagccttgcatgacagcgtaatgccattgtcatgtttgtgtagcaattgctggtaaggaagtaagtcccgtcgcaaaaaataatgggcgatattactgtaaatgaacaacacaacatcaaatgttttgtcgctcacccacgggtcacatgactcacttaccagtgactggatttcatcactctttgcaaacttttctttttttatatccagccattttattttagctaatgaaaacgactttaacttgttctcttcagtagccagcaaataccatatacctctctgattagttaatttatagggatgaacgattctggtcttaccggcatatgcaatctggcaaacattactgttgcagatcgctttttcaagaacatcaagatattttcttaaatcatccctgatggtgtgctcagggttatgaaactgaacacgaatatgcttttcggttgccctgttttctaatttctgccagaaaccttcatcccgttcaggaaaaatcgcatcagtatccagtaacctggccagagatttgtgcagtgattctttgctctggtttcctgctcttgccgaaataagccggtattttccatcgccacaggcttcaataaagggagaaagcatattcagatcacgatatgctgttcgctcagtgatgttgtattttttcatcaaattatagcgactgaccacgccataattttgtaattcaacaaggatatcaatcaaacgctccgctgagcgatttctcgttgagtcaaccataaatcactgcacctgtagtattactcttgtgtaagtgaattatataaatactcctgacatcatttgtcagttccacaaaactacgccctccggcaacagatttttatttgattatgttcaaactttaaaccagatgtccgggagcctccttcgtaatacggtttattgtttccggaagggctgatatgacaaaaaacaacgtgtcccaacaacagtcctttttcatttaacagactgacaaccatactgcgcgctacttgccccctgtaaaaaatcaacgaaagtaatatttttgctctatttatatttcattcatctgaaattattagttgccagagggagaatatcatcaggatatctgttattgatttgtcatacctgcactttactgtgctccaaagcgcaggcagaaatggctgtcagaagttatatgttgcacctaacataaactcgttacttctgacatcaacagaggatttatatttagcaccatcctcatctttataagtcagagtggaatcccctgcatccagataccggtagctgaggtcaaggctgaaatcctgcgtcacatcgtatttaacaccggcacccaggctccatgccaggttgttttcgtattttgacgctgaagctgaataaacttcactgcctgccgggctgttatcggtatatatgtacgaagttttatgatgaacccgtgcataacccagaccagcagatatccatggcgtgaatgcactgctgtttctgaaatcataatacgcattcagcatcagcgtgtttacactgagcttgttctgtgcatcatcgaactcggcaccaccggcactttcccaataactcagacgatattttgattcagcgttaccgcggccataaaactccacttcagtacgcaccggcacattgtagtgctgataaaaatcgtatcccaccgcaaggcctgcgccaaaaaccgtatcacttttgtcactgcctttgtatttatccgcccatgccccttcaccatcaacgaaacgttgctctgaaagtgacataacagaaacaccggctttaccggtcacataaaagccagttttgttctcatcagccagagtctgggccgaaaacatgcctgccattgcaagtgttgaaacagcaataacctttttcatttcaatcatatccgttggttcttaccccacccgataaagaaggttgctcattttaaaaccatgcaaaagacaaggtaaaaagagaaaattcgatcgaatcgatagacaaaatcgatcatgaatgatgaagatttcttatcgaagacatgaaaatgataaggaatggtttaagaggtaattgcaacggcatggaagtattgagaccagaacagcacgagataaagcggctgaacgtcagatgagccacatggacgtaactcagtgcaggcagcgtatatccataaagcggagcatctggatgagcgcaagctgatgctgcagtggtgggcagattttctggatgccaatcgggagagagcgattacgccgtttgactatgcgaagatcaatcggggtaatggcgagtgagttgtttatcaaatttgctaaattaaaactatttaacctgccttatagggacgattggttggctatttcactagaagtaatgtagataacagaagcctggtctatcattttgatagaccaggtcaagattaatagaattagattttttattggcgtgttgaataaattttaaagggtcctaataagtttgtaggatttaattgaaaacagtaagggaaatacttaacatataacttcacgctcttctattaaatcaaaaacattattcgtagtgtaatgttcccatcttttattatatccctctttcgacaaaattgagacatcatccgttccttctccctcatctaaaccatgcatgaaacaaactccagcaacattagaaagaacatatctattatgcagacattcattaccctcgcgagaagttaaagacttaaatgttactgataatttaaaatcgtctggaaagacaaggttttcgcggttcaacttattagccaaataattcaccgttggggagttttctttactcccatcaaatataacatctatctttaaattttttttataagagttattagcactaacgctaagtaatgaaataaatacattccaccatctttgtttgtcactaaagtatgggtcaactataataatatgctctgatgtttttaataagcgtgagattatagatatcatatcctcagcaattctagcaacaattttttgccgagcataatttaacccaaagaaatcatctatattagttacatcaaggttatcacaaggagtagaactcactacatgatcaaattgttcaattcgatttacagcagagatgttatctgaccatgacatgtcaccaacataatcataaaccctactaaccttattatttttcaaaaaaataataaggtcctctaattgttttttttgaagttcactatgattagcatttaatagcccaagcaattgttttttatttctcttcagctttggtaattcactatagagaaagttaccgcccgtagaaaatccttttatgaagtcacgataatttctccgatcaattgcgatctcaaacaaagcctctggtgaaatggcgcattcgtagaacattaaaaaagctctccccttctttcttcgaagaaacctttgggccatttttgtttgaagtctccatcatcagtaatatctattttcctagtaacagtcgaaccattattatcctcgaaaacgatcactgatataaaatcaggttttactgggtaatttgattcaggtaattcattgtccgttgtttgtctaattctttttaaaattcgaagcaaaatgtgctcactatgtgtttcgactaaaaacataggtcttttaacatcaaggggatattgggtaaacagatcacctacagcgagttgtaaagcgggatgaatatgtagctcaggctgctctatagcaattaatccatcctgaactatattggctgcaataataagaggtgctatctgagttaatccgacaccgacttgatttggaaataacatttggcttgaatctattttacagaagtaaacattatctttcagacctaaaagttgaggggaggtttttatatcaaattctcctccactaaatatattataattagtgtttagtttatctctattggaaaaccaatcacttacttttttaatcaaatcactatcattttgttgagataaacacagcttatcccatgctgatgtaccatcaaaccatccattttgttctggataaggatttggcgtaaatgaagaatcaggtataattcttaacggtccaatagatacgctagcctttaaataattatttaatttatctaacggagaagtaaaaacttgcgttagcactctggtgattatatctcgattaaaatactcaactggctcggatatatcaaaaactttcaaatttgtatcaacagttcttcccagttgaggtaacgcaccaattttcgtctttaaaaaaacaggaaacattggtttttctttatcttcttcaaatatataatcaacagtttttactcgctctgttgcaccacttttattacgttctaagccaggaattaagtcatttaaagatatttcaaattcactggcaatcgtatctaatccttccttatcaatagattcaagccataaattataatcaataggaagaagcaacggatgagtaaagttcaatctatttactaaagatgatttagtatactcatcattacttagctctccaataaattcattatttatagaaacagcatagttctttatatatgctgctctgtgcaattgtgaccatgcgattttaaattctacataaaccttttcagtttcatctgcaatgtctttcatttttataaaatgaatatcgaaaatatcaccaagttcttctaaatatgttttatattctacacctattgtttgttcaggatcgaaaccgataccaatagtaattacattattcagatccccattatggactagagatctaaatccatctatgcgcctgttccccatagcttctaaatatataggatcacactgctcacggtctaatatttgttgaagataaaataatgcaattaaaatagtagtcttgcccgcgctgtttggccccaatagtaatgttacaggtgcaaaatcaatttcctgccgctctctaacagatctgaaattttcaagtacaagtttagttaatttcataatgaaccttacatgaaatatttattcgataggtttgatgctaaaagttgaagttgcattgcgcttttatcataaatgcttagtcctttttttatttttttataaataatctcatactcatcttgtagatgcttaggtgggattaatatctctatattctgcaattcctgtgcattaatattagccatgccaacaatacttttacacatattcatcaatgtgattttgccatggatggaattaagataccctgaaatatagtagttatttccgatagaattaggtctaacgcggattaaatatccagcaaatgccataggcctgtcttcttcatacacagctgttttaccaacaagttccttactgttagtacgattgaaaagaagatcgccttctttaaccaaatatttatccttttcttttacactgagatcaagatattttaaatctgtaaaatcccacctaccttgatatgttatattacccatccgtaatataggatattcaccagaatcaatagaggcttttgctgaagttccataatttactgaatcaaccaagtcgcgaatcgttcctttcgggaaacgatgtatgttgtttgcaggagttccaaacatctctagaaacttagcccgcaaaaaatcatcagccagtttgatggcttgctcgcgttttttgtgtatgccatcggctttatcgagaatagtggcgatacgcttttgctcctctaatggggggcatggtatttttaattctgaaaatctacttttattaattattgcaacagtagttgacggtgcaattttttttagatcatttttcaataattttaaggcgtaaaatccgaatctataatagatcttatcgtcatcaaaaataacactattgatttgttggttagtagcaactggaagatctgctatcgccattttacctaaagaaccgatacaacaaactaatatactatttttaggaatcagctttgtggttgctaatcccttttctgttaacgttgtctccggtttgagtaaatagtccgaatccgttagctcagacggtgtaatgaaagggatatttccgccaaaacagttaggatctgctttaggcggtgttttgcccgtgattacttttgcaacgctttctatactcaccatcggccaactcacagcatcccctccagctcatccagatccgccagaatctctttttccagatcttttaatcgtttcagtatcaccttcggatcttcatactcctccgcctgatacaccacttcgttataacgattaatagagagatcgtatttctgcgcagcaatatcttcttttggaactacaaacgccgcctgcgtgcgatctttaaaatcaacgccagcatcaatcccttccgggtgctgctgtttaagcaacgaggctaatttctcacccataaagttatcaaccggcagcccgcgtaaagtacggtaatgcttccagcttgccagcagatgcggcaggtcgttgtctttaattgggttacgcttgtcatccaggctgtagccatcattttgcagatcgtagaaccagacctcgtccgtctgaccgcctttggtaaagatcaggatcgccgtcgccacgccagcgtaaggtttaaatacgccggaaggcaggttgatcaccgcttccagttggttatcttccaccagcgttttgcgaagtgactggtgcgccttactggagccaaacagcacgccctgcggcacgatagtggcactgcgcccgcccactttcagcatttgcagaatacgcgctaggaacagtagttcggtttttttggttttcaccattgccgacagcgtggagtcgatatcttcttcgtccagtgaaccggtaaacggcgggtttgccagaatcaggttgaaagcgtttttactggcctgcgggaagtttgtgctgaagctctggctcatggtgtcctgatagtggatatccggcgcttccacgccgtgcataatcaggttcatggcggcgatacgtaacattgtggtgtcaaagtcgtaaccgtggaacatattgttatccacatggttacgccacggggtcaacagatcgccggtaaagattttttgctcttccagctcaccacgttcgttggtgccaatctcggtatgaatggattccagcgagctgtacttctccagtagatattcatagctggttgccagaaagccaccggtgccgcaggccggatcgcaaatcgtctcgccgcgggcggggttcggctccatcatttcaaccatcgtgcggataatgtggcgcggtgtgcgaaactggccgttgattccggcagtggtcagcttgcttaacaggtattcgtaaaggtcgcctttggtgtcgccgcgatccaatggcaggtttttgatcacctcaaccgctttggtcagcaatgaaggcttaacaatctccagacgggcatctttcataaagttgcccagcagcgttaccttcgacgcatcagcctggccgagctgacgaaaatgctggaatacaccatcgcgcaccacttccatcatctcatccgagccaagattgctatagtgactgaaacggaactcctgctgttctggtgcaaaacgcggtttaaaatcaatacccgcgatttgtttacgcttctcgtcgcgttgttcctgagtatccagcatccgggaatacattagataggtgatctgttcgattacggtcagcgggttggtgataccacccacccagaaatcttcccacaggccgtcgattttactttttaagtcaccagtgatcattgttagcttttatatcctgttttaaatacaaaagccccgctgccggggcttgtcatgtgcgtattataccgttgctgcgtcggtcacaacacccagctcttcgactatcttttgtaggcgggcgatctgctctatatcagggaacacaccggtaacgccttcgttgtggatatgcgtaaaaggctgttcaaagagctgccgcatttcaatggtgccgtaatcgcgaatgtggtttttcagcaatgacaggaagcgcaattgctggctggtcaggctgttatcagcggcgaactgagcaaagcgcacttccaccgcgtcgctgtccatcccgatgatggtacgcaatagtttatccaggctggcggtcgcctgcgggtagaactctttcagtgcccggatatcaacgttagggttctggatcagcaccagtttagccagttcatccagctcgctttgcgtcacaggctcgccgttgcggattttcttcagcaccggattttgctggaacagcggctccagcgctccctgcacctgctggcgatagagtttgaagtcaatcgagcggatgttggttttgcggttttccgtctgaatcaggttcgcatcttcggtaatatccacctgtatcgaaccaaatttcggcgtcgcgtctttttccatcaggtgcatgatgccgcgcagatgaatgcggatatcttccagctcttccaggctggcctgcttccaccagcctaaatcacgaagctgattgatccgcggtccttgctgttggacctgcgccaaatgcggcggcaggcgctccactttttcgacgatgaccggccagagcacatccagctcttccgggttggtataacgggcagtttgcgccgccagaatatccatatcaaagcgcatagcgtcgctttgcccgcgcacgtccagccactgcatcagcggggccaggacagatagcaaatcctgctgtgttttcggggaaagctggcgcagcactttttcatcgctgtactgcgctttttgatgccacttttcctggacggcaatcgacttttcatccagtgcattgatttgctcgcgtagctggtgagcaactaaatccaccgcctgtttgtcgaatttacgttgcgcagcggcccccagcataacccacgcttcgaagcgtttttgtgcaagcgattttgtcgctgtgacttcggcctcttcggtatgcagttcgtgatactcaaaattgccccagtgatcgaaaatgcggaatttctgtttatccagaggtttgccgttatcgtcgtaaccgtacaaccccggacagaggcgcgtaccacggccaatcatctgccagaacttcacttttgatttgaccggtttggcaaagaccagattcacaatttccgggacatcaataccggtatcgagcatgtcaacggagatagcgatggtcagctctttgttggtgctttcatccagccctttaaaatcatcaatcagttgctcggcgcggggatcgtaattgtcgatgacctggcagaagcgcccggcaaactgcgggtacatatcgtcgaataattcattcaacagcagcgcgtgtttgtggttacgggcgaaaatgatggttttacctggcaactggccgtcccgatctttcaggccattttccatcaggttacgcaggatatagcggttggtgtctttgttgtagatcgcctcatccagcgccttgccatcaaactccagcgtattgggatctatgccttgttcttccagctcgcggatttgtgcgtcgcttaatttctcccgtttgatgccttcgcgcaggaattctgtggtgtgcgtgacaacctcatagggaaccagattgttatcggcgatggcatcttccaggctgtagttggcggtaggaatacgtccttcacaaccaaacaggccgaaagtggttttactcaccatgtcaatcggcgtggccgtcaggccaatctggagggcatcaaaatacttaaacagatcgccgtaaacgttgtagatagagcgatgggattcatcggcgatgatcaaatcgaaataaccaacatcgaaatggtccatgattttcatcataccaggataggtggcgatgtagatcctagcattctgcctgtctgcttttttcgatttcccgaccacatacagcggctcattggtgaattgattaaaggcattcgccgcctgtttacgtagttccttgcggtcgcaaagaaacaggacgcgttttacccagcgggcatcaatcatcagtttgcttagcgctattgccacgcgggttttgcctgtacccgtagcctgaacaattagcgattgccggtatttgttggtaaaccgctcgctgacacgggcaatggtttcaagctggtacaaacgtccggcaacgggcttaccttcgttatcttttacgtgcggcacactgttcagcggaagacgggtttcacgctgttgaataagatattgcaggctttccttgctgtagaagccaaacacccgacgcgggggataaccatgagttttatggtcatcccacagccagatatcatagccgttggtgtagaagatgatcggacgctggccgtattctttttccagccagtctgcatacagccgggcctgaattcgtccttgctcggcattgacgctggttttttttgcttccaccaccgccagcggtttgtgtgcctcatcccacaagacatagtccgcataaccgtctccggtcgcggtaggttgttctttaacgggatgttcctgcgtaacctgatcggtatttttaaggccttcgcctacattccagtcagcagcaagcaggcgagagtcaatcaggcgacggcgggtttccgcttcatcaatagagagaatatcggcaacatgctggttacgcgctctggcttcattcaggcgttgagtgaggtgttcggccttttcctgttcttgctgtagtgcgcgttgcagcgccagttcgcgctcacggctttcatcctgagccctgattgcatcttccagacgtttttcatctgcacgacctgaagattgtgttaatggagggagtgtaaatttggggcagtcatcaacattaccgtgggcgtagcgaacatacagccaaattcccaacaaatacgcttctttgagcagccagtaagtatctttagctttgatacgtccgccgtgcgcggcacggttgccatggatacgcagcgcatccattttcatgatgatggcttccggcatcatgctggtaaagacatcagcattcattaaatcgtaaagattagccttaataccttccggcaaccgctcctgacgatacaaccagcgcaccatcaattcggtgtagttgcgcagcttgaccagacaactttccggatcggagtgaacatagcgttccgccatacacgcgagttcagccagttccggccactggctgcgcaacatttcaaaattgagagactgctccatcaatcatcgccttatgtcgtggatacaacagcatttctggaaagaatatcacactaatttggccgacgaagtgagccggatggcatatggtggtgatgtgtttaacgacataactgctctaacggtcagatccttggttttcgcccatcaatgggcatcttcagccatggctactcacaggataccttgctaaccaatgaaggtatggctgatcatctatgggatatgttttttgagccaataaaacgatggagcttttctccaagttcatcattaatgaattttgtttcaatgcattaatcaactcttcgcattttcgctatcttttatccacttcccttttgaaaaggtgggtatctacgttaccaatactggtttaatggctacatacggcggtccgtttacgcttacggtaaagataagcgataagctcccagcgctaggaccgggagctctgcatagctaccaccatttaggatagtcgttaaaagcacgtaatattgattgcctggcagcaggcatcaagcttttcacttccttttgaaagggagataccaccattgatatcttccttcatacatgaccaattcagcacaccagcgactggatatggcgggaaatggtggcccgggggttacaggcagtgaaaccatcgtcagggatgctgttgccaaatggcgtaaaggctggaacccaccagttactactgccgccagacttccttcagtgtcccgggtaagccgctggttgatgccctggataataatcaggggtgaagaaaattatgcttcccgatttattagtctgatgtgtgaaaaagaaccggcgctgaaaatagcgcagcaactagtacttgagttctaccgtattctgaaaaccccaaataaatcaaatctaagcagttggttcactcgagtccacgaaaacggttcagcagaacttcggcgcgtggctgcggggatggaagctgatgctgcggctatatgtgaggcaaccagcagccgctggagtaacggtgttgtcgaaggtcatgtaaatcgcctgaagatgctgaaacgtctgatgtatggtcgagccggatttgaactacttaggcagagggtaatgagtccactggcatgaaaatctccacctaggttgcggaagagccacttttgcaccgttcgtgataataccgtaaataagcctctgaaagttataggatatgacacaactaaagaagtctgtgtgaaccgcgtaataccaagtgaattgcttgttatatctgtttaattaaacctaatcgaccagccttactggagaggctggttagtgattaactgggagtattgcaattagatgtgttctacaggcccacgaaggtagatggctgccagagttcatcttcgcgtgtaaaagactcttagttgattaattctaatttatcaatctattacgcgatcataatattcgatgatttgcagtgcaacagcagcaatttgtactgcttcctccctactggtaccggctgctttaccaccaaaacgatcatggaggacagcctgatgaaattctcccacctcttctccgagaatcgctccccagataaaaggatcttgattacggtctgccccccatttggcatcctgccgttgcatttccgctagcacgtcagacagggctttagtgtcttgatgtttacttttcatgtttcccttacgaatccgtgattttaagtccatcattaacatttaatatgtgcagagtccattaattcgctacatctcattttgtgaatgagcgttgagtttgctataaacgtagcaaccaagaaaaataaaagtggataattttgttcattacctttcaaagcaagaagttaaggactatttgcgagagtatgcatgaggcaaatgagatctttggtgacaaagtggcatcaagactacgctcgcgactttccgatctttccgtgacagacaacatattactgttgcccgtaggttcgccggaggtctgctttgaggatggggaagagtgtattacaattaccattctcggtgatgtaaaaatgggatttgtctgtgggaatacagttcagcccaaaaatcaagataatacaattaactggtcccgagttagccggatacggttagtgttcataggtgacgtgaaatgatagttacgcaggacttccagcctgactgggtatctccacccggtgatacaattatagatctaatggatgaacatgggctttctggtgaagaactgagtaagaggattggattgtctcttatccggggtcagcaacttcttgaaggaaaaatccgactcaatgagtctctggcttgtaagcttgaggagttattcaacgtatcgacagacttctggatcaagcgcgaagtcgcttatcgccagcaaattggatacctcgagaaagtgaataatgattggctcgaatcattgcctgtacgtgatatgatggagtttggttggatccccaaaactacaactcgggaaagtaaattccagcactgcctatcgtttttcggaataaattccgtcaatgattttttttataaaattcagtcagatgctcctttggtcgcttttcgtaaatctcttaatctggcaaccgagcctatggccgatttggtgtggctgactagggctgcacaacttacctcaaaccaaaactgtgctgtatgggataaagaggggctgatagcattgttgccagaactgcgcaaagctacaaatgaacccgacatgaggatttttatcccttacattcgcgaccttctcgccactgctggagtttctctcgttgtgttgccaacgccaaagggatgtcgggcaagtggtgctacctgcttttttacaccagatcgcgcaaccctagtcatgagtttccgttatctgaccgatgaccatttttggtttacgctgtttcatgagattgggcatctcatcttgcatgaagctgtccgagttcgcgtagaaggtaaagatagtctttcgtcggaagaggaaaaggaagcagataaatttgccgttgatgttcttatcccagaagaataccggcagcaacttagtcgctatggtgtccggcattggaaagagatcatccggttagctaggaaaatgggggtatccaaagggatcgtactgggatatttgcagcatgaaggtaatatacctttttctcaccttaatcggtttaaagtgagattccgtaaagaagatatcgtctgatatcagccgccgaaatagacataacggtcaggtgatttctgccagttgcacaacgcatcttcaataacctgcattctcaagtagggtgcaggaataattgccgcaaggtcagctagtttttcattcaatacgtctattgtgtcaccagcagtccggctattgctgaaaagtagccggcttccttgaaggggcccggttgctccattcagaaaagcatgacccggctctacatccagaagtcccgttttcttgagcatagttaggtaatcaaattttgcggttcgtccaaatgagatcacggcatttagccctgaatacaatagttcgaataaagattcaggtgaagatgaaaagctcttggcctctgcaaacctagcctcatgactgtgtgtagcaccaatgaatccgatgtaagagcgaaaaaccgcaggtattgaacgacgagagtgatatttcttcgtttcatatttccgatggttaccatattgtcttaggctactgttagctgtcaactcatcagagacgctggcgaaccattgttcaaaagcagcaaagtcatcagttatcgtatcccatgtccacgtttgtgtaccgagtccactgtatatatctcgacacaaaatccagccggttttgttactcttgccgaaatgtgtggcaaggaaaaccagccagcaggcttcatcgtaattgttgtcacgaagataaaggcaggcagcgcggagaggatcaaaaacatcagaattcggctcttttcgtaacggagtcatataatcggtccgtaatgcaagagtttccacatagcgtatacgacgtatactgtcgataatctgacaggctaaaacatcaaagcaggcaggagaacttaggccatttaggttgtgttcattgcggctaaaattttgcaaattactaaccagctgactgatttgattatgtcttttcattgtagtcttccttcaaaaataaaccgatattcctgatttttcattgcagccaactcttggaaggctagtcctttgtggttgggtgtatgtgaacgtaacaaaaagtggatttttaatatacgcaataaatccttccagtagtcattcaaggaagtagtgtcaatatcaaattccttattctctcgaagagctttttctgcctcaagcaggggtaagatatcatctaaggaatgcatttcaggcatcgatcccatgactggtagggtgctcatgaacccctctttctgaagagccttcactttttctaaatcatttttatagagatgtaggctggatacaaagtgatgatagtgacccaattcgcatcctatcaagcgggcaactaattcctgtagcatcgtgaacgcaaatacatcatgaggcagccccataaaggcatcgttagaacgcatacaaacaaatagatgcagctcttcacatctgacaataaactgcatagatattgtacaaggaatatctacgtattctcgctgttcagtttttgagggcaccaagtctgaggcatcgaaaagctgtattactgcacgtctggtaggttttttctcctgcaaaaggttgataacattttttagctgattatataaaccacgcatattaaacaaccgtggcccgtaaccaccatgtattttcccatctgactcagcggattcagcgtaacgtggtatgaagtgttttataaactcaagatcgttctgagctgagagataccacagaaattcacctaagcaactaattagttttcctcgggattctgttctacttattcttcggcgggggtcggtaaggacaagataggcaccaagaatctctagagttgatccttttgtaggatcgttactgagtccatccgctaggatagcttgatgaacatcgtttatcagatcgtcaacacactcagccgttaccaaaagagtcattttctaccttttcctgtatggtagtaactaatcattaccacctgtatggcatatagtcaatatagtatcaatatcaacatggttcacagggtaagtaagacttgatcttacccagcaatagtggacacgcggctaagtgagtaaactctcagtcagaggtgactcacatgacaaaaacagtatcaaccagtaaaaaccccgtaaacagcattcgcctgaatttctcagtgaagccctgaaacttgctgaacgcatcggtgttgctgccgcagcccgtgaactcagcctgtatgaatcacagctctatgcgtggcgcagcaaactgcagcaacaaatgagttcgtcagagcgtgaaagtgaactggccgctgaaaatgcccgcctgaagcggcaactggcggagcaggcagaggaactggctatcctccaaaaggccgcgacatactttgcgaatcgtctgaaatgaagtatgtctttattgaaaaacatcaggctgagttcagcatcaaagcaatgtgccgcgtgctccgggtggcccgcagcggctggtatacgtggtgtcagcggcggacaaggataagcacgcgtcagcagttccgccaacactgcgacagcgttgtcctcgcggcttttacccggtcaaaacagcgttacggtgccccacgcctgacggatgaactgcgtgctcagggttacccctttaacgtaaaaaccgtggcggcaagcctgcgccgtcagggactgagggcaaaggcctcccggaagttcagcccggtcagctaccgcgcacacggcctgcctgtgtcagaaaatctgttggagcaggatttttacgccagtggcccgaaccagaagtgggcaggagacatcacgtacttacgtacagatgaaggctggctgtatctggcagtggtcattgacctgtggtcacgtgccgttattggctggtcaatgtcgccacgcatgacggcgcaactggcctgcgatgccctgcagatggcgctgtggcggcgtaagaggccccggaacgttatcgttcacacggaccgtggaggccagtactgttcagcagattatcaggcgcaactgaagcggcataatctgcgtggaagtatgagcgcaaaaggttgctgctacgataatgcctgcgtggaaagcttctttcattcgctgaaagtggaatgtatccatggagaacactttatcagccgggaaataatgcgggcaacggtgtttaattatatcgaatgtgattacaatcggtggcggcggcacagttggtgtggcggcctcagtccggaacaatttgaaaacaagaacctcgcttaggcctgtgtccatattacgtgggtaggatcacataacctgaaatggcactaatggccagagcttactaatacataatccctacaggatgtagccaccagttttgttcatccggtattctgatttggtaacatgctccagaaaggaagaaatatgtactgcaatgaattaaaagaatttgcgcaagagcaggaacaaaaacttatcagtgcgcttgctgataccagagagcacccgtcccccgatggtgaaacaagaagccgggataattatcaacgggattacgcgcgtattctgtattcatcatcatttcgcaggctgcagggaaagatgcaactttttgaaattgatcctgaaaaattcaacagaaacagattaacgcacagtcttgaggttgctcagatcgcccgaagtatcgcgtcagacctcaaactgattaacccggtggtggttgaactggcagcgctggcgcatgacatcggaaatcctcctttcggtcattccggtgaaaaactgcttaatgaactgtctgaagaaatcggcggctatgaaggtaatgcacaggcgctacgtatcctgagaaaactggagaagaaattttcatactgcaacggattaaatctgactcaccgtagtttactttcggttgttaagtatcccatcccccgcgctgcagctactgccggcaagttcatttatgatgatgattactatttttacattaacctgcttgctgaaaatcagctcgatctgaatcccggagagaaaacgattgatgcgcagataatggatctcgcggatgagattgcctacgccgcgcatgacctggaagatgcccttagcaggaacatggtcacgattgaagatattgaatatgagtttcagatttctgacgaattccggggagcgagggaacagttcagggaaatcgttactcagtcgagaaacaccgcttttcaggctaacttactgaaaacctcagaagaatttgccatcatattccgcaaggagttaacttcaaatattgtcaatcgcctcgttgcagatatttctgtagtaacgaacctgaatggttttcaggaactggggttcgggaaactgaatgcgttatccgaaggactcaaaaaacttctctttaaagtcatcatgcgaaaacgtaatatcctcacctatgagttcaggggaaataaaataatcagggatttatatgacttttacaatgaaggagagaattataaatttctgcctcctgaacttaaattcaccttaccccaaccagattcctgtatatttgaaatcagcaaaaaacgagcagtggttgactatatttcaggtatgatggatacatttgcagtcaaggaatgggaaactcactgtctgaagtaacactgccgattaccagaggcgcatattttcccgttatggttattgcgcctttattccgtttcggtgacaggttattttaaatattctggaaatgcgttgatgggcaagaacaattaccctgaaaataaatacaggaaatggttttccacagcaataacatatcttattacaggtggtttgtgctggtatatgttgtgggcatccgctatatctcattatactgttttacaaaatacggtacctgaatggacaacatatttttgcaccggtataatcaccggatctctttcttttatttatgcattttatatccgcacctttaacagaacattaaagtctttattaaatgcattcacggggggattttgtcttggatttatactgagtctgaactgttacgatgtctgtgtttatctttttccggataaggttattagctatgaatctgaatatgatgttgtttttccgggaccatcaagaggaaagtatggacattgtgaagcgggactctggttgaaagatcaaaacacttccagatggatacaactttgtacaaataaagagttcctgcgcagtcaccataagcaggggatgacaggtgtatgggtaacagctcgtgttaataaaattgggtcgtatatcgtgaaatatgaatttatctatatgtaggtaaaagctgacatgtttaccatggatgagttgctatatttttgcgcatacaggagtaatcgattactggctatactaaaaatacagagaaaagctatcccgggataaagattaccaactcacagagacaagccttgccttataaacagataaatatcatcaacacagattcagaagctgaagcagtaagccatggttaactgcctgctgccagtacagataaaacaatcagtctcgctgactggctcttatcactatcgttatttcataactctacagtataactcatttatctttattgccatatattagcatgaagtcaggcattttcattccctgtcgataatatatcaactccggagaagtgcttgctatatattccttgatattaatacaaattcaaatatatattgctgttattcataatcaggaccagatgatacttcctgagatataagaaaatcatcaagagaacctccggcttttatagcctctgctatggccttaggccgacgtccttgcccattccagtacattcttttaccgttatcgtcatactcgtatttatgccctcctgacacactttttctgcctgcctgtgattttttgccaaatttacgacaaaaatcttccagagatataccatgttcatccatgagtgatttgatagctttcatattttcctttcgctcatcacgttgctgaatagctatgtcaaagttttccttaaccttatttaaatcttcatcagacatttctgtgaccagttttttaacaaagtcaatactcagaagtaatgcccggtaagtaatgaactcttcattttcaacagaaattttcttcttactcatttattaacactcagcttttcattcatttatggcaaatcctatcaggtgatttgccataaaaataatatatgtatcacatttttcgacacttaatcgtcacttcctttccgaaggaaaggccatcgcagaaagtaagagaacgttctttgtatttgatacttagcgaaattgcgccggtcactacttgtctgagtccattcactttcgttaatgttaatgagaaaacccgcagtatgatgcgtaatttcatcaaactgatgaaattcggtagcaatcatatatctggtgtagcctgcatattcgcaggaaaatgaatatcgattatactaatggactaacaatctccagcctcttcaagaagatgttataaatacacacagatactgattctcatccctttcaggcctggaacactatttctgctttttagcatcatctggtagcgatactttccaggtatgtcgccccatttttgttcgtctccatttttttaagaattgtgcaagtaaaaaactttttacctctcctggaactgtcgtatttgctgatattgttcgtttgtctaaagaacctgctggtcttgtcattaatattacctgctgattgcttcacacccgggctcctcgcactgcgcgcgggttattgtttcgttttcagccccggggtcgccaaggctctggatggggtactacttccattgacagcatgaggtaacaatactgatggtaacgctgaccattaaccgtaaaccacagggcattttcagtaaatcatcggcaacgccgctgcaggataaaatgaacactgcacacaacgtgaaggccagggaacggataccacagttgaacgataaacagagccctgctctgctgaaaaaacaccgtggcggcatatgacaaaacgccagcgtaaaaaccgtaagcgtattaatcgtcttgtggaacactggcctgagttattcaaccgggaaaaaccccaaccgcttaaagttgagatacctgacgacctgatacaggatatcgccatcagagaactggcgtttagcgcaggtgcattacgcgcggcagtagcgtcttatgtgcagtctccgcgctattaccgtgcgttaatggctggcggcgcccgttacgacctgaaggggcagccgtgcggggaagtgactccacaggaacagaaagaggcagagacccggctaatggtgctgaatgaccgacaaaaagccagaaaacctcgttgactacacaactgcgctgattcactgagctgtaatcaatgtacagcgctgtaccggacgatgggtaatggcggtcacaaccggtaaccccagagacaatgcgacggtttttaacgctacatactgaccggatgtatcaccccgggcaacccgaaaacacctttcaacctggcattgtccgccagcgcttatcaccttccaggtctgttgcaataaatccacccgttgcgaacattcttcatcaaccgtggcactggcccgcggatggcaaatgctcgtctggctgagcagcaacaggcatcgtattgttgctcctccatgttgttcccgcaaccagcgtaataccaccggcgaggatggacaggcagtgtgattacgctcagtaatacgttcgtgcacctgtcggtaaaaggaagtacagaatgcctgaatctgttgcccgttgatgtttccttcagccgaatggagcgtgaagtggactgccagcagacgcggccagtggtccaccgcctgctgaacaaaacgccggatgtctcccggctctgaaattaaggcttcggttatttgcacgaaatgttccttttcaaaccctgttgaattttgttaagccggtgcagacacacgggaaggtgcgcatcaacaccggtgtaatgccagttataaacaatgtgaatggaatgacgaatcagtcaggaaagagctacaacctgctggctgaccggagagggtcagcaggaaaatgaacggtaatgtcgccagcaccagggacagggctgatttccgcaataccagcgccggcattttgcacattgccagcgtaccggcatcacaacacgtttcatgctgctgctcctcgtgattcctcaattcgctgctgcatccactgctccacttcacttttgtaccagcggctgctgcggcccagcttgatgggtttcgggaaatggccttcactgatcagcttgtaaaaccatttatcggtcatgccggtgaaactggtgatgtagttcatgtcgatcaggggatcctcggcacgcagcaatacactgtcgtggcctgttattgaggtcaacatagtcagaatatcctctgtgagatttatgaaggttgggcaaatgcgggtgaatctgctgaactgagctttcagagctggcctgctacgggataccagggattgccggcaaggcaacgggcttccggatcgcacactccacggcgatcgcgggcgaaatcactgaacgccctgataaggtccttaaacagggcttcgcagtccggtgaccggcgatccagtaccacatcccgggtgatctgcttctggtacggctttgcttcacctggtgacgcgaaacccagcacattactccaggcatccagtatcaaccgatccagttcggggccgtcgaaatactcctgtctgacgcacagcaccacgtggtattccggcttttccggatgacgggtcaggagccagcaaaggtcgcgtccgggtttcgcattcatcagcgcactgacggtttcgataaaatccataccaaaccaggtctgtctgctgctgaaggcgttgtcatgttcccacggcagacgaagcaggatccgtcgtatccgggagccggactgctcacgcagcgcacgctcaaggacgccgatgactttgttctgataagatggccagaagggtgccaggctatagtcgaaataaggaatagcattcataagatatgttccgttatgcgcagcccacaatgcgtcctgcccgtgaatgagctgacgtgttatggcttgcggatgagattgatggaataagtgaagaactgaagcagaacgggaagataagggacagaacaccggattcaggttcaggatgaatgatctccgttgacttcagttcacatcattaatcaatgcggtaagtttttaccgacggagtgtttccaggagcggaggctcaggccttaagcttcagaagtgaggcttacgaggacgccctgcagcaggacgttcaggaacttcattgcagccgtaggcacacagcccgtctttttgctcttctttcgccagataatgcagggcaccgcgaatattatcgatgctttcaggatcgttgtggcgcacaggaatgttgatgttgtatgtataatgcggctgatatgtacagcggtgtgccgaaccgctgttatgcgtaatagaccgccagcattccgtaatccgctccgcaaagggatatatttttttaaccctctgacgatcgatccagaaaaccgcatgcgcatgaaaaccatgatcaaccgtccattcaatcacccagaagaagccaacgatattttcaaattgttccacctgctccagcagcatacgcaactgcaattcaagccagcgatgatcaggttgtaagaaatcaggcgtatctttcctgtagaagaaatccatgcgtaaggcccgcaggcaggaatagcgtgccatcatttgattgatgtgattgtcaagtaaagcggtaaaaaaccagtttggtgtgtaagatttaggcatgttgatgactcctgaaagttaatgatgttttaagctctgtgagcgaattaatgctttcgctcataatcagatctaaaacggtaataacttacagatggtatttatcaggcatgctgtagcagaatgaatacgacgggttattaacgatacgcagcattatgcagaaagaaatggattatctgatggtatttgctaaagagatgagataaacgaggagtaaagaaaatacagactcaataaaacatcacgaaatactgcaaaatacgcgataaaacaccacgtccagaaggttaagaaacatattgcgaccaatcacatcataaactacaaacttgctctcagtggttgtaaaaactgtgtacaaggccaatgcaataaacttatatgcgctcattcaatctgttcttaaggacatgaacattcacggctcacgatagcagaataaaaaataccactgacatgattttcatcctgcatcttagataatacaacccagaacaaacataatcaggaatctctcctgtcaattccattgtttatccagctctgttaatcgttacagaatcatggataccttatcaaaaagtaaacattcggttaatcagtaatgacaaaagaattgatgttcatcagaatagttaaaacacttcagataaacaaccattgttaagaaaatacagctcatgatggataagattaaaattaattgctgtttcagtgaaaatgagaacagatgaatatcatcagtagaatggtagagaataacttacctgaacatcatatgagttacagtaaatatgattgagggatggaatgaatacgataacaagagtaatactaatggaatgtgtaacgatagagtgaatataatcgtaaagatagagagtgagtaaagacaggaagtaaataacaatagagattgtatgaaaaagggagtgagtataataatagtaataaacctaaattaaaattatccatgtttaatgaatggaaatgagaaatccgccgttctgaacatattccggacagttccattcccttacaaaaaaatatcaaattaattttcttcaaccctctattaaaacatgaatcgcatcccttatcagtaacagacgaataataatttgttattcagaaagagagcgacatcgtcatataccccagcactcatcacggcaagaatcaaacaaacttatatataaaaactcacacaatatggttaatgattagctttaatccatgtttaaaacaatctttcgatcacctttcgttatatctgaaacgaaaaccactcttccaccagtgcgcacatcccagcattcaatcagctctgacagcaggtcattatgaaaacaaaacaaaatcacagatgtagtatatgtgctgctactgttgctaccatagcgattttttcagagaaattttcattcacacccaataattggtgaatatttgcacaggtgcaggatatgcaacacaccttatcatcaaccttcattcgaaggattatgattttcgttttctactcacaaaattgttttaaaataaggtgtaagctgaggaatcaggtgtaaatgactgaattaatgccggtggaataacaacggaatatgttttcgcattatggttatactggggtggaacaatatcaaacggttcgtaagacattgcgccgaaaggaaggatgtaaccattattatcaagagcagaaacataaagtgcctgatgcgatcgcatcttgatgatacggaaataattctgagcgattaactgattgagtacaggtgtaagtttttctgctcttctcagacgattgggaccatatctttcaatgtctgttttcctgatagcacgccaattattctgccttattcgggtcataatccatgcatacagttcacaggcatcctgttcaaactggcatcgtgcagacatgggataaaatattgtgctcgcctcctccagataccagtccatgagatgcatagctttaaaaagcgcaattgattcaatttcctcagcatctttatagcaatagcaggtgaatattccagctatcctcagtatattagaacctgctttcagaacaatatctctgatgtgttcccactcccctcctgcaagcgcttttctttcaatcttaatctggttttcctgccactcccccaacgctttctttgcaagttttaatgttttcctttcggtgctcataccgggggaattaatgttatggcttaacagaaatccgttaatctttttatgaaacttctccagggttggttttgttctgaactcgcctctcgtataatcccgtacccgggaaggacttccggtctgactgaacagaaaccgggaaagaaatccgcttccccacgccagtacgtcattattatttatataattcgtaaagacatccggctgggacattaacgaaaatgtcagacgtggcgtgatatggtatttctcgtcagcccgtccaaaatcaaacggttgtccactccatgctttattcaacaggcccggataatttttcagatagcttctgaaaaaagtgaccgcctcgtcagaaataacccctgcctcaggatgttcattgagcccttccacaagcgctttaagcgaaacatcttcatagataaaattcggtcgaaccggacgtgtcggtttatttctttcgtgattacgcagcgcctcttcttcctgttcccccggatacccccggttaacagcctttcttaaattggcagcaagcgctttctgccgggtattccagatctgtagttcagtcttataatctttgtttctctcttcgtattgttgaatgagtcgatcggcaaattcgtaacaggggttcatcaccagtctgtttatcgttgtttttcccgcgcctggctctgcgattgccaacagataaagtgagcagggttccggcatgttggtgtgaggatgaacaacgtcaaccagtgactgacaggagagtgagagcgttgccagtacagtattaaaaatgagctccagcggaagttgggtactttcatataagtcgtcaatgagatatgcaagctcactaggaaataatctgtaggttaaatcagctgggaagtggtgggatgtctgcaaggattgcatataagcggaattcattgtaacggacctccttcacatactgtaatcagcgcaaaacttattgttcagttcaggaacataccggcatggtgagtatgttcgctgacgtcgataataaaatggcttatctccattcaccagtcccggcgcatttatgatgctgacaaaagtaaaacaacatgtgtgcatccagaagtctggcatcgcagcgacaaatgatggatgcatgaaaaccaggaaacattgcatgacttcaggacgactttttcagaaaacgagctaagggcgtcaaccacgcccttactgtgacatatactctggcaccggatgccgttttacagggttcacctgccatccagtagacgccccgctccacggctgcaaccataattacgttgaccagaaccgtcatgctgcttcgtctcatacttcacgagataacgggctctctccatggctttctgcatcgcttccacatcaccacgcttgatccagagaacagcgggttcacccggctttttgtctgaagccttccgggtatcagaacatccacccgacaaaggcgtatcatcggaagaagggcgagcatcagatgatgtcggtttacggaaaggcgtccgcctggaaaaatgaaccagtccattaccctgccagggctcaagatgcagagcactacaccatgccagcttgatcagtgtcgccagcgaagaaggaacggtgaaatcccctggcgagcaccaggtatctttgttgagcagtaatatcacgtgataatgtttcctgcctttttccttgccaaactcccgacaccagaaataacgcagagtggttgcacgcacacgcttgttggcacgtcgtttatgtcgctggtaagcctgaatttttgctttcagggatgcaaaaaaacgagaaatcaccgctgaatctaaatcggtatccatgatggtggcaggcatatactcagggaaacgtaaatccacccggattaacgagacggcacggtgttgcgccagggcactgttgagaatactttcaaaacgggataaccagtaagcattgtgtattggttgattcatgatgagagatctccgttgatttggattgacttcacatcattaatcaccgcggtaaaactttacggcatccggcattgagcaatgctacaactctctgattaagagtgattgaaacggaacaaaccatcccggaacgaaaagataattctacacgcagggtaaaaacactcaagaacagcgaatggatttaaaaacgacatggacaacgagaaaagtcagaagggaaaaggatccacagaacattcgaacaaaacaccagaaacgcaaccagaacgcttcctggtaatgcaaatcaacaacaaccccaaaacctacagcttaatcacacaactcaatcacggatgcgaatgacacgtttaaaacctgtttacagataaaccccgccacaagaacaaaaatcaccaacatcagaatcgattttctcatcctgaaaaagttacgtttcactacgcaccataaaaacgattaaccatcgataacgtaaacttcatctgaatcaaaacaccaaaaccgttcatcacactttcgcaatgcaagaagaaacctcatgacgaaaacaatgaccttacacggaaaagaaaaacgtcaggaatcgttaatgcctaaatctgattgttatcaaaacatccagaaagtcgtttaacagaatcgtcgtaagcacatcgaaaagaacgtcagattacttcaggaaagttcgggttgatttagcgtaaagatacttttctcatgctaacttcaaaactcgaaatctcaggaaaggttaaacgtaacatcagtaaaatcgaatagcagattgattgctgaagcagaaaggttttacagcagcattaaactgatttagttaacgtaaagatttactaaactggatgtgtttcagacaaagcaatgtgtatagcaatgcttaacgaaaacacttctacaagtgtttatgaaaatacgtgtataacacttactgaaatgcttagtaaaaatacttagtaaaatatgtgtatatagtatcataccgacattctcaacatcttcagacttccatacatactgggtgttaatttttcacttttacagccagcatggagttttctgtcctaaaaacagaacagatttactctggaattattttctctacctcagaaaacatggtctcaggaatctgctatggcttcgtagtttctgttgttcttttcataaaagttataagtcattgtcataatcatacgataatcactttatgttagcttttactgtcacacgctactgactttttcaaccattgccagaaaggggctctttttacttccatttcaccactcaacaaatgcaaaacttgtccagtaaagcggaccacctcttgctcacaagcaacgaatcgtctccaggaacagtcctcaaacattgcagaaacaaaaacaacaaaaccctcattatcactgatgttcggaaaatttccctgaacaaaaaaacgaaaacaaaatgagacgcattatcataaatatagtcaaaaagacgttatggtggctttcagttaaatggtactatttctcataaatccacttaactttttttactgattcatcccagagaaccactttatcagtaaaaaatgaattatatagattgacgagtttttctgtttcagttattcccaatatagtatgtatcagttgtaaatatacttttatccagatttctttaccctccctccacttatctataaaactttccagcttacttaatcgttgatttataaaaaatgaatcaatatcatgaaaaagctcaacaagaaaacagcacgatacaatctcaacaaaaaacaaattctctttaaaagtattataaaatcttatcaacacataacgaaaaacacctcctgttaatctttcctgttcataaaacaacaaaccaaaaacaggagggaatcttttaaccacaccacttttaatccagtaaggatgatgattagtctttactggcaatgaataaaagaacatttcggtttctcttttcccaccacaaacagacaaaactgtcttataaagactttttgaatcattatgtcctggtaccccagacgaattagccgagtattttctttttactttttgccttaatggagctggaagaataataaaacgagatggcagataacaatcgctttcagaagaccggcattcgcacacatgaaggtttatatttacatccggacaattcaaaaaccacacagaataattatcgccccgtttgcaatatgaaacccatgaataaattgcataaagttcagaaagcgcatctaactctgcttttgacttaaatgtgattccgtttcttcgaattctcgtttccagcgttctccatgcaggagttttcagtatctcacgaacttttttattaagttcagtcagcgatggtccctgctcctgtttatgtttttttctgctgttaatgatttctctttcttttactaattttttcttactttttggtccttttatctttcttggcaatgcttcatttaatctgtgaacaggattttgctctcttctttttttgagctcacaaaacctctcataatgttttctgcacagtcttttctccactgccatttttactgagaaaacctgattgttacaattttttctgacacatttgtttttacgtccggtcatcctctcatctcctgaaaccgcagtatgtcattagttcccgttcggaaaaactcacttcatactccattacactttaacaatcatgtccgtaattcagacattccatcatttttcacgtccatattacctgaatgataaaccggattagtgtgatccggttcagcgaaatcaacaggataccggtatgtcattcagccattcttccctctctgcacaagtaaaatcatatctgacgtttcttcctgaagaaattcgccagaaaatccttgaacatctccacggtgttattcattacgagcccgtaattggcattatgggtaaatccggcaccggcaaaagcagtctgtgtaatgccatttttcagtcccgtatctgcgccacgcatcccctgaacggctgcacccgccaggctcatcgtcttaccctgcagctcggtgaacgcagaatgacgctggtcgatatgcccggcattggtgagacaccgcagcatgatcaggaataccgggagctttaccgtcagttactgccggaactggatctgattatctggatcctgcgggctgatgaacgtgcgtatgctgctgatattgccatgcatcagtttttactgaatgaaggtgcagatccctcgcgttttctgtttgttctcagccatgccgatcgcgtgtttcctgctgaagaatggaacgacacagaaaaatgcccgtcccgtcagcaggaactctcactggcgacagtaacagcccgggtggcaaccctgttcccgtcatcatttccggtactctccgttgccgcacctgtcggctggaatcttccggcactggtgtcgctgatgatccacgcactgccaccacaggcaaccagcgcagtttattcacatatccggggggaaaaccgctctgaacaggcccggaaacacgcacaacaaacttttggtgacgccatcgggaaaagctttgacgctgccgttgcccaattcagctttccggcctggatgttacagcttctgcgtaaggcccgggaccgcattatccacttgctggtcacactgtgggatcgtctgttctgacacactcacgccgacaggatgtgtcgctggattaacaagcattcttctttttatgaaaccctgcttaaaaatcagataattaaaggaatattttttctgctgcattttatttctgattattcggatgcgacacatcctttcaacatcatgatgcataataacatcatgaaataaaagatgttttcttacggagtgcacatctatgtctgataatcgttcccggcatgatcgcctggcggttcgcttatcactcattatcagccgactgatggccggagaatctctgtcactaaaaacactgtcagatgaatttggtgttacagaacgtaccttacagcgcgattttcatcagcgtctggttcacctggacttagagtacagaaatggccggtacagtctcagacgacagagcagcccaggtgcgatccctgaaatgctttcttttatacagaataccgggatcgcacggatacttccgctccggaacggacgactgataacctgtcttaccgacaaccaggagccctctccctgccttatctggctaccggcgccggatatcactgcaacgttccccgagtgtttctcgcaactcatcctggcaataagacagtgtatccacatctctctgatgactgagcgatggtatccgtcactggagccctgccggctcatttattacagcggtagctggtatctgatcgcgttacagaagggaaaactgcaggtctttcctctggcagatatcaaatcagtcagcctgacatcagaacggtttgaacggagaggccacatccacagtctggtcgctgaagagcgttttatctccgccctgccacatttctctttcatccataaacttatcaacacctttaacctgtgatcgccggcctgccaaagccgtcccgacaggtatggagacaatatgttgaacagaaaactaaatatacggctacgtcattccctgaacagtcactgcataccttccatcattatcaataacaccgtacgttcatttcagaggtcagtcatgaataccagagctctttttcccctgctgttcactgtggcatcattctccgcctccgccggcaactgggctgtcaaaaacggctggtgtcagaccatgacggaagatggtcaggcgctggtaatgctgaaaaatggcacgattggtattactggcctgatgcagggatgcccgaatggtgtacagacgctcctgggcagccgtatcagtattaacggtaacctgatccccacatcacaaatgtgtaatcagcagacgggattcagggctgttgaggtggaaatcggacaggcgccggaaatggtcaaaaaagccgttcactccatagcagagcgtgatgtgtccgttttacaggcatttggtgtacgaatggaattcacccgcggtgatatgctgaaggtctgtccgaaatttgtcacatcacttgccggtttttccccgaaacagacgaccactattaataaagattccgtcctgcaggctgcccgacaggcatacgcccggaaatacgacgaggaaacaacagaaaccgctgattttggctcttacgaagtaaaagggtaaccgtctcatttaaaccgtctttcgcctccctttcctgtttccgatactaatgtccattttcgcagtaaagggacatttaagatgaatgcacgaaaagcggtactggcagacaatccggaattgatcctgcgtgtgctacagctgagatttgacgagtcactgtcgtacccgcgcatttctgcgcagaccggtgtcagcaaaaccaccattttttctctggtgaggcgatttcaccaggtattcactgactggcctctttccggtgaatattcctgcgggcaactggcccgggctcttttcccggggcgatacccttcagccccgaccgtgactcagcctgtgaaagcagagaaaccccgccggaaccgattttcaccggagtttaaatggagactggttcagcaaactcttttacccggtgcctgtgtcgcacaaatagctcgagagaatggaattaacgataacctgctctttaactggcggcatctctggcgtaacggtggcctgcaaccgcccggcgaacatgaaacatcgctacttcccgtgacgttaactccggagccggataataaaatcccggcaccagtgcagatacctgaacagataaatacactgccagacagtctgtgctgcgagctggttctgccggccggaactctcaggctgaaaggtgaactgacaccggcgttattacagacacttatccgcgaaatgaaagggagcagccactgatgatatctctccctgccggttcgcgtatctggctggttgccggtatcaccgatatgcgaaatggctttaacggcctggcctcaaaagttcagaacgtcctgaaggatgacccgttctccgggcatctgttcatcttccgcggacgccggggtgaccagataaaagtgctgtgggctgacagtgacggactgtgcctcttcaccaaacgcctggagcggggccgcttcgtctggccggtcacccgcgatggaaaggttcaccttactccggctcagttgtccatgcttctcgaaggcatcgactggaagcacccgaaacgaacggaacgcgctggcatccgcatataacccgttgtaaagtgaggatatggacacctcacttgctcatgagaatgcccgcctgcgggcactgttgcagacgcaacaggacaccatccgccagatggcgaaatacaaccgcctgctctcacagcgggtggcggcttatgcttccgaaatcaaccggctgaaggcgctggttgcgaaactgcagcgcatgcagttcggtaaaagctcagaaaaacttcgcgctaaaaccgaacggcagatacaggaagcacaggagcgaatcagcgcacttcaggaagaaatggcggaaacgctgggtgagcaatatgacccggtactgccatccgccctgcgccagtcttcagcccgtaaaccgttaccggcctcacttccccgtgaaacccgggtcatccggccggaagaggaatgctgcccggcctgtggtggtgacctcagtcctctggggtgtgatgtgtcagagcaactggagcttatcagcagcgcctttaaggttatcgaaacacaacgtccgaaactggcctgttgtcggtgcgaccatatcgtgcaggcaacagtaccttcaaaacccattgcacgcagttatgccggagcggggcttctggcccatgttgttaccgggaaatatgcagaccatctgccgttataccgccagtcagaaatataccgtcgccagggcgtggagctgagccgcgccacgctggggcgctggacaggtgccgttgctgaactgctggagccgctgtatgacgtcctgcgccagtatgtgctgatgcccggtaaagtccatgctgatgatatccccgtcccggtccaggagccgggcagcggtaaaacccggaccgcccggctgtgggtctacgtccgtgatgaccgtaacgccggttcggaaatgcccccggcggtctggttcgcgtactcaccggaccggaaaggtatccatccacaaaatcatctggccggttacagcggtgtgcttcaggccgatgcttacggtggttaccgggtggtatacgaatccggcagaataacggaagccgcgtgtatggctcatgcccggagaaaaatccacgatgtgcatgcaagagtgcccaccgacatcaccacggaagccctgcagcgtatcggtgaactgtatgccatagaggcagaagtccggggatgtacagcagaacagcgtctggcggcaagaaaagccagagctgcgccactgatgcagacactgtatgactggatacagactcagatgaaaacactgtcgagtcactcggatacggtaaaagcgttcgcatacctggtgaaacagtgggacgccctgaacgtgtactgcagtaatggctgggtggaaatcgacaacaacatcgcagagaacgccttacggggagtggccgtaggccggaaaaactggctcttcgcgggttccgacagcggtggcgaacatgcggcggtgttgtactcgctgatcggcacatgccgtctgaacaatgtggaaccagaaaaatggctgcgttacgtcattgagcatatccaggattggccggcaaaccgggtacgcgatctgttgccctggaaagttgatctgacctctcagtaaatatcaatacggttctggcgagccgcttacatatcaatacggttctgacgagtcgcttacgtaaaaggcaataaggttgagtttgaagtattcaatcctgaagaccgtgcgtacgacaaagtgaccgtcacggttggtgctgacggtaatgccaccggcgccagcgttgaatttatcggaaaatagccggtatgtcggactgccaccctgttttattgcccgaaggccctttctcacgcgaacaggcggttgccgtcacaacagcttaccgcaatgtgcttattgaagatgaccagggaacgcatttccggctggttatccgcaatgccgaagggcagctacgctggcggtgctggaattttgaacctgatgccggaaaacagctaaattcgtatctcgccagtgagggaattctcaggcaataaacgtcttcatttcatccatcaggccgcgtcttctccgggagacgtggctttttcatttattacaccagtaaatcttaaccaccgataaggagcaaattatgcgactagccagtcgttttggttatgcgaaccagatacgccgtgaccgtccgctgacacacgaagaactgatgcactatgtgccggggattttcggggaagataaacacacgtcccgaagccagaactatacgtacatccccaccatcaccgtactggaaagcctgcagcgggaaggctttcagccattcttcgcctgccagacccgtgtgcgcgacccgggccgccggggatacacaaaacacatgctgcgtctgcggcgggccggagagataaacggagaacatgtccctgaaattattctgctcaactctcatgacggtacctccagctaccagatgctgccgggttacttcaggttcgtctgccagaacggatgcgtctgtggccagtctctgggggaagtgcgtgttccgcaccggggaaatgtggtggacagagtcattgaaggggcttacgaggtggcgggggtttttgaccggattgaggaaaagcgtgatgccatgcagtcgctgattctgccggcaccagcacgccaggcgctggcacaggcggcactgacttaccgttatggtgacgaacatcagcccgtcaccaccgccgacattctgacgccacgacgccgggaggattacggtaaggacctgtggagtgcttatcagaccattcaggagaatatgctgaaaggcggaatttcaggtcgcagcgctaaaggaaaacgtatccatacccgtgccattcacagcattgacactgacattaagctcaaccgcgcattgtgggtgatggcggaaacgctgctggagagcatgcgctaatgctgtttccctgaaagtgcagccctgactctcgtctgtaccaatccccaggcattcttccattcatttactttttataaggaatcatctcatgacaaccttttcgcatagctccaccacaccttctgtttccgtaactactgcatcagggaataaccagtctcaactggttgccaccatagtccctgatgagcagcgcatcagcttctggccgcagcactttggcctcattccacagtgggtgaccctggagccccgtgtcttcggctggatggaccgtctgtgtgaagactactgcggtggtatctggaatctgtacaccctgaacaacggcgggcatttatggcacccgaaccggatgacgatgatgacgaaacatgggtactgttcaatgccatgaacggtaaccgcgctgaaatgagcccggaagccgccggtattgctgcctgtctgatgacgtacagccatcatgcctgtcgtacggagaattatgccatgacggtccattattaccggttgcgggattacgccctgcagcatccggaatgcagcgccattatgcgcattatcgactgaatggaggcagggacaatgcagcagctttcctttctgcccggagaaatgacaaccagagagcgcagcctcattcagcgagccctgaaaaccctggaccgccatcttcatgaacccggcgtggccttcacctccacccgtgcggcacgggaatggctgattctgaacatggcgggactggagcgtgaagagttccgggtgctgtatctgaacaaccagaatcagttgattgccggtgaaaccctcttcaccggcaccatcaaccgtacggaagtccatccccgggaagtgattaaacgcgccctgtaccacaatgccgctgccgtggtgctggcacacaatcacccgtccggtgaagtcacacccagcaaggcagaccgccttatcacggaacgtctggtacaggcactggctctagtggatatccgggtgccggaccatctgatagtcggtggcagccaggttttctcctttgcggaacacggtctgctttaacccgtcaccgtcacaatcaccttcatatcacttcagtttctctttctcagttgtttcttactttcacattcaggaggactattctcatgaaaatcatcccccgtggtgaagccatgcgtattcaccgtcagcatcctgcatcccgtctttttccgttctgtaccggtaaataccgctggcacggtagcactgaagcgtataccggtcgtgaagtgcaggatattcccggtgtgctggccgtgtttgctgaacgtcgtaaggacagttttggcccgtatgtccggctgatgagcgtcaccctgaactgatgttccgtcacccggaaaacgagtacgactggctgagctcagacgccgctgtggatgaggccctgctcataaacgaatacacctttaccgaaggcggtctgcgcgccggctgacctgtcatcgttaaaccattcttaaccgattttctgtgaggattttatcgtgtcagacgcactctccgggacaatgcttcccgacgacaatcacgaccgcccctggtgggggctgccctgcaccgtgacgccctgtttcggggctcgtctggtgcaggagggtaaccgcctgcattaccttgccgaccgcgccggtatcagaggcctgttcagcgatgcagatgcgtaccacctggaccaggcctttccgctgctgatgaaacaactggaaatcatgctcaccagcggtgaactgaatccccgccatcagcataccgtcacgctgtatgcgaaaggtctgacctgcaaagctgacaccctcggtagcggtggttacgtttatctggctgtttatccgacgcccgaaacgaaaaagtaaaccaccggaataaccttctgctccggcctggtgctttcaccacgccacttttccatttttcatctctgcatatcaggaaaaccttcagtatgaaaacattacccgatacacacgtacgggaggcatcgagctgcccgtctcccgtcaccatctggcagactctgctctcccgactactgggccagcattacggccttacactgaatgacacaccgttcgccgatgaacgtgtgattgagcagcatattgaggcaggcatttcactgtgtgatgcggtgaattttctcgtggaaaaatacgcgctggtgcgtaccgaccagccgggattcagcgcctgtactcgttctcagttaataaacagtattgatatcctccgggcccgccgggcaaccggcctgatggcccgcgacaattacagaacggtaaataacattaccctgggtaagcatccgggggcgaaacaatgaaactggccctgacgctggaagccgacagcattaacgtgcaggcactgaacatggggcgcattgtcgttgacgtcgatggtgttactctcgctgaactgattaacgtggtctgcgataacggttactcccttcgtgttgttgatgaatctgaccggacatcagcagagcgcacgccaccatctgcagcccttaccggcatacgctgcagtaccgcacatatcacggaaacggacaatgcctggttgtactcgctgtcaaatcagacgaatgacaccggcgaatcagaatggattcatttcacaggtagcggatatctgttacgtaccgatgcgtggtcatacccggttctgcggcttaaacgcctggggctgtccagaacgttccgccgtctggttgtcacactcatccggcgttatggcgtcagtctcattcatctggatgccggtgctgaatgtctgcaggatttacccactttcaactggtaaccaggaacaacatgaaatcattaaccacggaaaccgcactggatattctgattgcgtggctgcaggacaatatcgactgcgaatcgggaattatctttgacaacaatgaggataaaacggattcagcagcactgttgccctgtatcgaacaggccagagaggatatccgtaccctgcgccaactgcagcttctgcaccagaaccgataaatattactcaccatacttcattccactgacgccagcctgaacagggctggcgttttcatttatctgcaaaaaggaatatcaattatgtctgaaatcacagcctcccgtccggaagtggtcaacggggacattatctgctccacctcagtcagccacattctggctgtacaaaagagtacacagctgcaaatcgacacacttatccggcatcaagtgagcgatatcagttaacagatatagatggagaagatgcttttatccggattggttctatcgcgatggtgctagtactacttgatgcaatgaagcctgtcgaggaagatgacgagtaacagagctcggtatctcaatcaggagctgattgtcctggttcgatgccgaaaaccagtgatttttcgtgttggtatctgtgttggtataagatgatattgtttattattaacaattttaaatcatgaggttaagtcacatgttcgagtccggccttcgcaccttcgcaccttcgcaccttcgcaccatcggaacatcaatagacatcaacggacgtttttttatgactgaaatccgcgccacacaaggcttttcgctatttttcgctcaacctaagtcaacctacatcaacttactgatgtggatacagctacagctgcggctataccccgattcgataatgtttgtacccacacaaaacccttgaaaggctacaaggctgaaattgtctaaaccatagagatgatttttatgatccagtctttctcttgttgagatagttccagtttgctcactcgtgttaagaaggtattgatcacctgaacatccgaattggtgagcctatttaatagagcgggtggtatacctttactaacaatcgctttgcggtgactttcgtagtttttattactcattgttgatcctaaaaaatcattgtatggcggcattgatcgtttccagcaacctttacttactcacttcgaactgcatcctcgtagactgttccactacaataatcgaaaaggcgcggatgtccattcaggtatcccgctaatacgtatagcaataacaatggcttatgcggcgcgcgctgttcacccttgtgccagatttttatattggcaattgcctgctgtagcgatttactggaagctattgatatccctggcagtgaaataattgcgatcatgctcgcaaattttctgctgttcaagcctgcaagtgaagatatattaccttgatctcatttgtttttttgctgcctgttctgagaacgtataaggacattctccatgaataaactccctgatcatcttccgcggcggtatatcatcgaagctatccatttatgggatgcgggagaaactcatcagttccagcctgcgcggttgtatgagattgaatatcatggccgacgttacccctcgaaggcgattgctggcatcgcagcgacattgatgacggggacgcaatttacccctgcggatttcaccggcggaataaaatctaaatgtgtcaagctactcatagagcagggatttcatattcatctggataaagccgctgcggctcccatagccgacgttctgttcccggatgagttgccgtcgcaggagacataccttgaaggtgcggcgataaaggtgacagtaaaccgctatgaacgcgataaaaaggcccgagataaagcggtcgaacatcatggatgccagtgcaacgtatgcggtgttgatctggtgaagatctatggtgatatcgctgaaggctttatccatgtgcatcacctggtgccgctgtcagccattaaagaggattaccagctggatccagttaatgatttgctgcctgtgtaccctaattgccatgcgatgttgcaccgacgcaaaccaccgtttacgccggagcagttaaaagcgctgatggatgcgaataaatcaaattaatgaacgctcacctttcgcgccaaaactgcaaaattgcttctacaaacttgtcagaaataatcccccgacgggctgccgtgctgaaatgactgcttcgcagtgccgtcgtccagttctccggtgaccggtacgctgaaccgtaatatcccgtgcttaaatcgtccgggtcttcatcaggcgcgttcgtcagtcctctttcaccttgttgctggaagtcgacgaaaataatattggctaaaacattattttgataattgccataaataacttcatacgcatgagggaaattttctttccagtaccaggtggtatcgccgcaaaaccacggtgcgtcagtaatattattaagctgagaatggtattgttttagatccctacgaaaggcttcaaccatatgattaaagtgttgagggtgtgacgcgtagtcactggtcattaagtcaaattcgccttgcatccagcatacgccgaggaatttgttatgcggattttttgccagtgcggctcgcgttctgctgactaaatcctggtatagcggagtatccgttccccaacgacaagcatcatggctggctccgtgccgttctgaatatgtcccttcgctgcccgcggtaaaagccgatccgccacggcaacacggaacgatgagaacccctgcattatcaggaataaagggcagtaatttccgtgctatatgcagtgcctggccaacggtgccgtactgtgtttgatgattcgttgccagaggatggtgataaccctgcatatcctgaacatcgtgtgggcagtgagtcagtggaatcatgtcgttaaagtgacatggcgggcctccgggatgcgtatgcgcaaatctcgctaattgtttgattctgggatgaggcgcatcttccctgtccggtaatggcagtccttcgccatacgccatggcattagactgaccagcaatggtaagaatatagtaataatcgggcgatattattgcgttcatataaatttcgcgtaattgaaatgacaaattgatagcagggcccctttaccggggccctgaagcgttagttttgtactgtaactttattatccttcacagagatcaaaactgaatccgtcaccgctttgccgcctgcagtttcaccgccaataatcaatagactattattccagggcaatgatactccgtaggcccgaccttgcgataattcacccgatttatcccatttcccgttatgccaaagatgaatatcagtgctatatgattttttcaggccttcatgcgcatagttcttaccgttctggtaattttctcgtgaacctttgaatccggcccctccggcaaatataagagaatcattgcttatccccgcaaaaccgccagctacgccatctggtgatgagacgggagcaagcttattccattttaaattattaccggtgaaatcaagttcaaatacggcatccgttcgcaatcctggtttggcttcgccattaataagccaggttttatcacctttattcacaaccgccgcaccagccgttccgtaccagggcgattcgccagcgtaactccattgctgtgttgagggatcaaaagacaacagaaacttattgaaaaaataatcttctgcttttttgtcaaaatagtgagcgttgattttatctatagcggttgaatcttttccagcctcgttgagatcttcaaaatagccattgaagatattctggttaacaccgccagtaacataagccttgccgttgtgtacaaaagttacatgacccgccatgcccatcggtgcgtgcgacatcaatttaacccaactattggttttggggttgtatttgtgtacgtcattaaatacctgagtcaagccctcgctgtttttgccaatgccgccaaacacatacagattgccatcaataaatgccgaggttgcttgatctcttggtccaccagggaatgcagctaacgctttccattttttatctttggcctgtgtatccagcttgtaccatgccgtacctgcgctacctaaaccaatgtagacagtgtcgttatcaattgctccggtaccacttttaaatggcacaggagtttccggtaatacagacgcgtttgcggcaaatgaagccatcatgatagcaagcgccgttattgttttattcattgtgactgtctcctgtctactacagtttaaatgacacaccaatgcgataactgttttccgataaattatctctgccgttgtaaacaccctgacggtcaaggtagtcatattctatgtatggcgtaatatccggcgtcatatggtattgtagaacaaatgcattttccgtcgcccatttcttatggtttgcatagcgataatcgttctgtttgctgtatagcgtcgtttgccatgcgaaggtgaaatcactattaatatggtaagtgacatatccatcccaacgatgaacgttatcacgagacatatcaccggataagtcttgttgtcggtaagctttccagtcgtaacgatagcgaatgccaaaattaagatcttttgtcgcgtcccaggacagttttacgtagggtccgtagcgtgtgccgttgctgctaaaatgcgttaacattcccgggcgcaccgtccattgatcatcaagtttaatcgcgtaattaacatcaacctgaacatcattgagtgcggcattttcctttttattatcatgaatggtattccaggtattactttccatacttgcccaccatccattttgccatccctcactgactttgagtcgagtctcataggcgtggcttccactacgatatccaccacgtacgtccagtgtcgcagcttgagaaattaatggtgacgaaaagcacagtaataatacgccagaaagtattttagcctttttcataaatttcactcatttgtaggaaacagaaagcaatacaaagcccgcataaacaattagcatttatgttgtgtaatatttttttgccaggcttatagtgtctttggcaaccggtagctgtattttatattttttgtataaggtctcctgtgaaaaatctcttttcacattatttaaataaacagagagccagattaaatacctgagtataaaatctcttctgatgtttaattgatttgaatgttcgtaagctatatcacttactcaatccattttacccagagtcataaaatagagtgtctgttgatctcattttcatattcctttcagactgaagtgcattttcatcacccgatgtgaaagaactgaagtgatgtttgccatagattgcgagatgccctgtctcattgactatcttggtgcacctttatacctgttataccagatcaaaaatcacgcaatccatacaacaaaaccagatttgcaattcgtgtcacaaaatatgtcgatatttttctaagaagaagatgccatgtgaagccaaacgaacacttgcggaggccttcacaaaccaagggtcgttatttaattatctgttttataagtaatttatttagagtataaacaaggaaagatttgcaagataactcagtgggcgtggtgaaaataagtgtttacccgccatcaggctgagcataattctcatcatgaaatatgtttcctggtttgtggcttgtagctggtcactcctgaagtctctctggagaggcttgttgatgttggtgttttcaggatgatgtttcacttagcttgtttgccgaatagcccggcgaacagctgtgattgaggaaggtttaagtcgcagtgaccaaagccatatttaccaacggatgcagatgaaaaaatcatctcctgctttcccccatatctccaggataaaaaggaatgtaacaatctcatgaactaaactgacgaaccagccaggaataatcgctagggacctaagaattagcctgataatagctactaagaaattactgcgttccatgaaatagccattttgtggcaaatggagttgtctaataatgtcatatgtgagacggatagttgaacgaatattaaattttgctgaattttttatgttgattttacttgttacagaacatatcacatgatatatagataagattagttgcattaatgatgagggttattattagattcgtatccgattgataaatatataaaggtacatagcatgcaagagcatagcgtttgtatggcaacgttattataagtaactgttgctactccatttaagttcactcagaagaactggtccacttacgttagttattaagcaaacgttcgcttttataaacataatcaggataaaaatgttggattattgctaacccagcacagctagtgcgcgtctgtaattataagggaaaaacgatgaagaataaggctgataacaaaaaaaggaacttcctgacccatagtgaaatcgaatcactccttaaagcagcaaataccgggcctcatgcagcacgtaattattgtctgactttgctttgttttattcatggtttccgggcgagtgaaatttgtcgattgaggatttcggatattgatcttaaggcaaagtgtatatatatccatcgattaaaaaaaggcttttcaacaacgcacccgctattgaacaaagaagttcaggctttaaaaaactggttgagtatccgtacttcgtacccgcatgctgagagcgaatgggtatttttatcgcgtaagggaaatccgctttctcggcaacagttttaccatattatctcgacttccggtggtaatgccgggttgtcactggagattcatccgcacatgttacgccattcgtgtggttttgctttggcgaatatgggaatagatacgcgacttatccaggattatcttgggcatcgcaatattcgtcatactgtctggtataccgccagcaatgcagggcgtttttacggcatctgggatagagccagaggacgacagcgtcacgctgttttatagagatagttgagataccagggatggtgttaaaaactacattattcttacgatatatcaaaaatgattaaccatttattaattgatgttattgtaagtgtgattattaattttcataataaacattaagttaaccatatccatacaaaatacaatggtttatgttcttaaaaataaataaacaaaatcattcataaatttacacatcacttaaattctcctgtttccgcacttttttctttattttttaagcaactggaagttaatccactgcaatctattgttatattgaatcaaatcaatgaaaatagatgttatcacatcagtgatattttatttttgtatgatatttaatgtaattgactgatagccacatcacttcgtgtgtggttatctttttatctattgggctaattttgaccgattgaggtttcctataggtattcattcaaatatatctcagtcaggagtactactattgtgagtaaacgtcgttatcttaccggtaaagaagttcaggccatgatgcaggcggtttgttacggggcaacgggagccagagattattgtcttattctgttggcatatcggcatgggatgcgtattagtgaactgcttgatctgcattatcaggatcttgaccttaatgaaggtcgaataaatattcgccgactgaagaacggattttctaccgttcacccgttacgttttgatgagcgtgaagccgtggaacgctggacccaggaacgtgctaactggaaaggcgctgaccggaccgacgctatatttatttctcgccgtgggagtcggctttctcgccagcaggcctatcgcattattcgcgatgccggtattgaagctggaaccgtaacgcagactcatcctcatatgttaaggcatgcttgcggttatgaactggcggagcgtggtgcagatactcgtttaattcaggattatctcgggcatcgaaatattcgccatactgtacgttataccgccagtaatgctgctcgttttgccggattatgggaaagaaataatctcataaacgaaaaattaaaaagagaagaggtttgatttaactcattgataataaagttaaaaaacaaataaatacaagacaattggggccaaactgtccatatcataaataagttacgtattttttctcaagcataaaaatattaaaaaacgacaaaaagcatctaactgtttgatatgtaaattatttctcttgtaaattaatttcacatcacctccgctatatgtaaagctaacgtttctgtggctcgacgcatcttcctcattcttctctccaaaaaccacctcatgcaatataaaaatctataaataaagataacaatagaatattaagccaacaaataaactgaaaaagtttgtgcgcgatgctttcctctatgagtcaaaatggccccaaatgtttcatcttttgggggaaaactgtgcagtgttggcagtcaaactcgttgacaaaacaaagtgtacagaacgactgcccatgtcgatttagaaatagtttttttaaaggaaagcagcatgaaaattaaaactctggcaatcgttgttctgtcggctctgtccctcagttccgcagcggctctggccgatactacgacggtaaatggtgggaccgttcactttaaaggggaagttgttaacgccgcttgcgcagttgatgcaggctctgttgatcaaaccgttcagttgggacaggttcgtaccgctagcctgaagcaggctggagcaaccagctctgccgttggttttaacattcagttgaatgattgcgataccactgttgccacaaaagccgctgttgccttcttaggtacggcaattgatgctacgcgtactgatgtactggctctgcagagttctgctgcaggtagtgcaacaaacgttggcgtgcagatcctggacagaacaggcaatgctctgacgctggacggtgcgacatttagtgcacaaacaaccctgaataacggtaccaacaccattccgttccaggcgcgttattatgcaatcggcgaggcaaccccgggtgcagctaatgcggatgcaaccttcaaggttcagtatcaataacctacccaggttcaaggacgtcattacgggcagggatgcccacccttgtgcgataaaaataacgatgaaaaggaagagattatttctgttagcgtcgttgctgccaatgtttgctctggccggaaataaatggaataccacgctgcccggcggaaatatgcaatttcagggcgtcattattgcggaaacttgccggattgaagccggtgataaacaaatgacggtcaatatggggcaaatcagcagtaaccggtttcatgcggcaggggaagatagcgcaccggtgccttttgttattcatttacgggaatgtagcacggtggtgagtgaacgtgtgggggtggcgtttcacggtgtcgcggatggtaaaaatccggatgtgctttccgtgggagaggggccagggatagccaccaatattggcgtagcgttgtttgatgatgaaggaaacctcgtaccgattaatcgtcctccagcaaactggaaacggctttactcaggctctacttcgctacatttcatcgccaaatatcgtgctaccgggcgtcgggttactggcggcatcgccaatgcccaggcctggttctctttaacctatcagtaattgttcagcagataatgtgataacaggaacaggacagtgagtaataaaaacgtcaatgtaaggaaatcgcaggaaataacattctgcttgctggcaggtatcctgatgtttatggcaatgatggttgccggacgcgctgaagcgggagtggccttaggtgcgactcgcgtaatttatccggcagggcaaaaacaagtgcaacttgccgtgacaaataatgatgaaaatagtacctatttaattcaatcatgggtggaaaatgccgatggtgtaaaggatggtcgttttatcgtgacgcctcctctgtttgcgatgaagggaaaaaaagagaataccttgcgtattcttgatgcaacaaataaccaattgccacaggatcgggaaagtttattctggatgaatgttaaagcgattccgtcaatggataaatcaaaattgactgagaatacgctacagctcgcaattatcagccgcattaaactgtactatcgcccggctaaattagcgttgccacccgatcaggccgcagaaaaattaagatttcgtcgtagcgcgaattctctgacgctgattaacccgacaccctattacctgacggtaacagagttgaatgccggaacccgggttcttgaaaatgccttggtgcctccaatgggcgaaagcacggttaaattgccttctgatgcgggaagcaatattacttaccgaacaataaatgattatggtgcacttacccccaaaatgacgggcgtaatggaataacgcagggggaatttttcgcctgaataaaaagaattgactgccgggtgactttaaaccggaggaataatgtcatatctgaatttaagactttaccagcgaaacacacaatgcttgcatattcgtaagcatcgtttggctggtttttttgtccggctctttgttgcctgtgcttttgccgcacaggcacctttgtcatctgccgaactctattttaacccgcgttttttagcggatgatccccaggctgtggccgatttatcgcgttttgaaaatgggcaagaattaccgccagggacgtatcgcgtcgatatctatttgaataatggttatatggcaacgcgtgatgtcacatttaatacgggcgacagtgaacaagggattgttccctgcctgacacgcgcgcaactcgccagtatggggctgaatacggcttctgtcgccggtatgaatctgctggcggatgatgcctgtgtgccattaaccacaatggtccaggacgctactgcgcatctggatgttggtcagcagcgactgaacctgacgatccctcaggcatttatgagtaatcgcgcgcgtggttatattcctcctgagttatgggatcccggtattaatgccggattgctcaattataatttcagcggaaatagtgtacagaatcggattgggggtaacagccattatgcatatttaaacctacagagtgggttaaatattggtgcgtggcgtttacgcgacaataccacctggagttataacagtagcgacagatcatcaggtagcaaaaataaatggcagcatatcaatacctggcttgagcgagacataataccgttacgttcccggctgacgctgggtgatggttatactcagggcgatattttcgatggtattaactttcgcggcgcacaattggcctcagatgacaatatgttacccgatagccaaagaggatttgccccggtgatccacggtattgctcgtggtactgcacaggtcactattaaacaaaatgggtatgacatttataatagtacggtgccaccggggccttttaccatcaacgatatctatgccgcaggtaatagtggtgacttgcaggtaacgatcaaagaggctgacggcagcacgcagatttttaccgtaccctattcgtcagtcccgcttttgcaacgtgaagggcatactcgttattccattacggcaggagaataccgtagtggaaatgcgcagcaggaaaaaccccgctttttccagagtacattactccacggccttccggctggctggacaatatatggtggaacgcaactggcggatcgttatcgtgcttttaatttcggtatcgggaaaaacatgggggcactgggcgctctgtctgtggatatgacgcaggctaattccacacttcccgatgacagtcagcatgacggacaatcggtgcgttttctctataacaaatcgctcaatgaatcaggcacgaatattcagttagtgggttaccgttattcgaccagcggatattttaatttcgctgatacaacatacagtcgaatgaatggctacaacatcgaaacacaggatggagttattcaggttaagccgaaattcaccgactattacaacctcgcttataacaaacgcgggaaattacagctcaccgttactcagcaactcgggcgcacatcaacactgtatttgagtggtagccatcaaacttattggggaacgagtaatgtcgatgagcaattccaggctggattaaatactgcgttcgaagatatcaactggacgctcagctatagcctgacgaaaaacgcctggcaaaaaggacgtgatcagatgttagcgcttaacgtcaatattcctttcagccactggctgcgttctgacagtaaatctcagtggcgacatgccagtgccagctacagcatgtcacacgatctcaacggtcggatgaccaatctggctggtgtatacggtacgttgctggaagacaacaacctcagctatagcgtgcaaaccggctatgccgggggaggcgatggtaatagcggaagcacaggctacgccacgctgaattatcgcggtggttacggcaatgccaatatcggttacagccatagcgatgatattaagcagctctattacggagtcagcggtggggtattggctcatgccaatggcgtaacgctggggcagccgttaaacgatacggtggtgcttgttaaagcgcctggcgcaaaagatgcaaaagtcgaaaaccagacgggggtgcgtaccgactggcgcggttatgccgtgctgccttatgccactgaatatagggaaaacagagtggcgctggataccaataccctggctgataacgtcgatttagataacgcggtcgctaacgttgttcccactcgtggggcgatcgtgcgagcagagtttaaagcgcgcgttgggataaaactgctcatgacgctaacccacaataataagccgctgccgtttggggcgatggtgacatcagagagtagccagagtagcggcattgttgcggataatggtcaggtttacctcagcggaatgcctttagcgggaaaagttcaggtgaaatggggagaagaggaaaatgctcactgtgtcgccaattatcaactgccaccagagagtcagcagcagttattaacccagctatcagctgaatgtcgttaagggggcgtgatgagaaacaaacctttttatcttctgtgcgcttttttgtggctggcggtgagtcacgctttggctgcggatagcacgattactatccgcggctatgtcagagataacggctgtagtgtggccgctgaatcaaccaattttactgttgatctgatggaaaacgcggcgaagcaatttaacaacattggcgcgacgactcctgttgttccatttcgtattttgctgtcaccctgtggtaatgccgtttctgccgtaaaagttgggtttaccggcgttgcagatagccacaatgccaatctgcttgcacttgaaaatacggtgtcagcggcttcgggactgggaatacagcttctgaatgagcagcaaaatcaaataccccttaatgctccatcgtccgcgatttcgtggacgaccctgacgccgggtaaaccaaatacgttgaatttttacgcccggctaatggcgacacaggtgcctgtcactgcggggcatatcaatgccacggctaccttcactcttgaatatcagtaactggagatgctcatgaaatggcgcaaacgtgggtatttattggcggcaatattggcgctcgcaagtgcgacgatacaggcagccgatgtcaccatcacggtgaacggtaaggtcgtcgccaaaccgtgtacggtttccaccaccaatgccacggttgatctcggcgatctttattctttcagtctgatgtctgccggggcggcatcggcctggcatgatgttgcgcttgagttgactaattgtccggtgggaacgtcgagggtcaccgccagcttcagcggggcagccgacagtaccggatattataaaaaccaggggaccgcgcaaaacatccagttagagctacaggatgacagtggcaacacattgaatactggcgcaaccaaaacagttcaggtggatgattcctcacaatcagcgcacttcccgttacaggtcagagcattgacggtaaatggcggagccactcagggaaccattcaggcagtgattagcatcacctatacctacagctgaacccgaagagatgattgtaatgaaacgagttattaccctgtttgctgtactgctgatgggctggtcggtaaatgcctggtcattcgcctgtaaaaccgccaatggtaccgctatccctattggcggtggcagcgccaatgtttatgtaaaccttgcgcccgccgtgaatgtggggcaaaacctggtcgtggatctttcgacgcaaatcttttgccataacgattatccggaaaccattacagactatgtcacactgcaacgaggctcggcttatggcagcgtgttatctaatttttccgggaccgtaaaatatagtggcagtagctatccatttcctaccaccagcgaaacgccgcgcgttgtttataattcgagaacggataagccgtggccggtggcgctttatttgacgcctgtgagcagtgcgggcggggtggcgattaaagctggctcattaattgccgtgcttattttgcgacagaccaacaactataacagcgatgattttcagtttgtgtggaatatttacgccaataatgatgtggtggtgcctactggcggctgcgatgtttctgctcgtgatgtcaccgttactctgccggactaccctggttcagtgccaattcctcttaccgtttattgtgcgaaaagccaaaatctggggtattacctctccggcacaaccgtagatgcgggcaactcgattttcaccaataccgcgtcgttttcaccagcgcagggcgtcggcgtacagttgacgcgcaacggtacgattattccagcgaataacacggtatcgttaggagcagtagggacttcggcggtaagtctgggattaacggcaaattacgcacgtaccggagggcaggtgactgcagggaatgtgcaatcgattattggcgtgacttttgtttatcaataaagaaatcacagggcattgctaatgcagttacgcaatattacctgaagctaaaaacctgcacgttagccctttgtaggccagataagacgcgtcagcgtcgcatctggcataaacaaagcgcactttgctggtctgttcccctcaccctaaccctctccccggaggggcgaggggactgtccgggcacatttttagactttgtcatcagtcagagcctgccattggcaggctctggtgttcttttacgctaccttgctaataatcagcccaaccacggagttgaccagctccagcagaccccaggttttcaacgtgtcttttactgacaggtcaaaattatctaagaggcattgctaatgcagcgaatgtgtctgaacctgcggtctttgtcagtaccagcatcaggccaatgccgaataccacccagagaatgttaagcacatgcataacgttttaccttacctggttgaaccgttgttattttgggcgacatgttatgtaaattggtcaaccattgttgcgatgaatgtcacatcctctgatcaataaccatcgattaccctttgctgcaatttgcagcaacaaccatgagagtgaaattcttgtgatgtggttaaccaatttcagaattcgggttgacatgtcttaccaaaaggtagaacttatacgccatctcatccgatgcaacgccacggctgcggtctggttgttcatccggatacctaaacaactccagggttccgcgtctctttgctgtggaacccactatgtgaaagaggaaaaatcatggaacagacctggcgctggtacggcccaaacgatccggtttctttagctgatgtccgtcaggcgggcgcaactggcgtggttaccgcgctgcaccatatcccgaacggcgaagtatggtccgtagaagagatcctcaaacgcaaggcgatcgttgaagacgcaggcctggtgtggtctgtcgtagaaagcgtaccaattcacgaagatatcaaaacccacactggcaactatgagcagtggatcgctaactatcagcagactctgcgcaacctggcgcagtgcggcattcgcaccgtgtgctacaacttcatgccggtgctcgactggacccgtactgacctcgaatacgtgctgccagacggctccaaagctctgcgcttcgaccagatcgaattcgctgcattcgaaatgcatatcctgaaacgtccaggcgcggaagcggattacaccgaagaagaaattgctcaggctgctgttcgcttcgccactatgagcgacgaagacaaagcgcgtctgacgcgtaacatcattgccggtctgccgggcgcggaagaagggtataccctcgaccagttccgtaagcacctggagctgtacaaagatatcgataaagcgaagctgcgcgaaaactttgccgtcttcctgaaagcgattattccagttgctgaagaagttggcgtgcgtatggcggttcacccggacgatccgccgcgcccgatccttggcctgccgcgcattgtttccaccattgaagatatgcagtggatggttgataccgtaaacagcatggcgaacggtttcaccatgtgcaccggttcctacggcgtgcgtgctgacaacgatctggttgatatgatcaagcagttcggtccgcgtatttacttcacccatctgcgctccaccatgcgtgaagataacccgaaaaccttccacgaagcggcgcacctgaacggtgacgttgatatgtacgaagtggtgaaagcgattgttgaagaagaacaccgtcgtaaagcggaaggcaaagaagacctgatcccgatgcgtccggaccacggtcatcagatgctggacgacctgaagaagaaaaccaacccaggttactccgcaattggtcgtctgaaaggcctggccgaagttcgcggtgtcgaactggcgatccagcgcgctttctttagccgttaatacccaccggcatggctgcgcgccgtgccggttccttcttccttgccgtcactctctgaagacggattctggagtttacgatgactactattgttgacagcaatctgccggttgcccgcccgtcatgggagcattctcgtctggaatcacgcattgtgcatctcggttgcggggcgtttcaccgcgcgcaccaggcgctgtatacccatcacctgctggaaagcaccgacagcgactgggggatctgcgaagttaacctgatgccaggcaacgaccgcgtgctgatcgaaaacctgaaaaaacagcaactgctgtacaccgtggcggaaaaaggcgcggaaagcaccgagctgaaaattatcggttcgatgaaagaagcgctgcatccggaaatcgacggctgcgaaggtattctcaatgcgatggcgcgtccgcagacggcgattgtctctctgacagtcacggaaaaaggctactgcgctgatgcggcaagcggtcagctggatctcaataacccactgatcaagcacgatctggaaaacccgactgcgccgaagtccgcgattggttacatcgtcgaagccctgcggctgcgtcgtgaaaaagggttgaaagcgtttacggtgatgtcctgcgataacgtgcgtgaaaacggccatgtggcgaaggtcgcggtactgggactggctcaggcgcgtgacccgcagctggcggcatggattgaagagaacgtcaccttcccgtgcaccatggttgaccgcatcgttccggcggcgacgccagaaaccttacaggaaattgctgaccagctgggcgtttacgacccgtgcgccattgcctgcgaaccgttccgtcagtgggtgattgaagataatttcgttaatggtcgcccggactgggataaagtgggcgcacagttcgttgcagacgttgtgccgttcgaaatgatgaagctgcgtatgctgaacggtagccactctttcctggcgtacctcggttacctcggcggctatgaaactattgccgacaccatgactaacccggattatcgcaaagcggcctttgccctgatgatgcaggaacaagcgccaacgctgtcgatgccggaaggtacggacctgaacgcctatgcgacgctgctgatcgagcgtttcagcaacccgtctctgcgtcaccgtacctggcagattgcgatggacggcagccagaagttaccgcagcgtctgctggacccggtgcgtctgcacctgcaaaacggcggcagctggcgtcacctggcgctgggcgtggctggctggatgcgttacacccagggcgtggatgagcagggtaatgccattgacgtggtcgacccgatgctggccgagttccagaagattaacgcgcagtatcagggcgcagaccgcgtgaaagcgctgctaggcctgagcggtatttttgccgatgatctgccgcagaatgccgactttgttggcgcggtgacggcggcatatcagcagctgtgcgaacgcggtgcgcgcgagtgtgtggctgcgctgtaactaactgattaccctacagacttactggtcaatcaaactgatatttggttgaccagttttcgtttttttgcccacctgtacgtgccaacttccagtgctaatggtatagtttgagattaacaggggccgtaaaattgcccgttgtaggccggataaggcgttcacgccgcatccggcaaaaatttgattaaccgcacctaacggacacaacaccatgaaatctgccacctctgcgcaaagaccttaccaggaagtcggggcgatgatccgcgatctgatcataaagacgccgtacaaccctggcgaacggctgccgccggagcgtgaaattgcagaaatgcttgatgtcacgcggacggtggtacgtgaagcgctgatcatgctggagatcaaagggctggtggaagtacgccggggtgccggtatctatgttcttgataactcaggcagccacaacacagacagtccggatgccaacgtctgcaatgatgcgggtccttttgagctgttacaggcgcgtcagttactggaaagtaacatcgccgagtttgccgccctgcaggctacccgcgaagatatcgtcaaaatgcgtcaggcattgcaactggaagagcgtgaactggcttccagcgcgccgggtagcagcgaaagcggtgatatgcagttccatctcgccattgccgaagcaacgcataacagcatgctggtggagctgttccgtcagtcctggcagtggcgggaaaacaatccaatgtggatccagttgcacagccatctggatgacagcctgtatcgcaaagagtggttgggcgatcacaaacagatcctcgccgcgttaatcaaaaaagatgcccgagcggcgaagctggcaatgtggcagcatctggaaaacgttaagcaacgtctgctggaattctcgaacgttgacgatatttattttgatggctatctgtttgattcatggccgctggataaagtcgacgcctgacttattataataagcgcaagggtaaacgttccttgcgctttcttaaattaagaagtcgcaatgagtattactttgtaaattgcagggtattgtttagctatctgtataacctgaatgttagtactcattcttcctggtagttatttaccaatataattccattcaccattttttaattcaaacagttctggaagagatgacggttgcagagtcatacgtttgagtggtgcattttcatcacccgggataactttatatcccatttttgcatggatctccgcggtaccgggataggcttctataccaattattgggtcattacccaactcaatattagcattaagtaatgcggcaagggcgaatccggaagaatttgctacccctgttaccgtcattatctgatcaatatagatatcaatccttggctgctcattggtccatctttttgcctgagaagctggaagggttgaaatatatcctatcgtggttccggcataaccaggaacattgcaaccagggcctaatgttatttcatgaactgtatagtcctcaacaggatcgaaagggctcttcataaataaatttagccgtaaaccttctgctaactctgtggtagcatgcgcctttttacatatgccaccatatatttcgtctaaagctgaggtgattttcaagttccgatagagcatacgtcctgttgttgtaataccatcggattctctgcatgctcctgtcacataattaaatggccagggctctttactaatatcaagttttctaatttcgacaacgctttttccatcgtaattatggttattgccacgagtaagaggcggaagatagatgttttccgaatccatgcgtgcatattttaatttacgtgtaaactcactgtcgactattgggtgatgaaggaagtgagcatctgtaataatttgactctgaagggcattgcttaatggcatagacataatagttaccttttatgagtatttcactgatgtttagaaaaatagataaatttttctgtagtaaaaagagaagtaaacaaatgacatgcatgtttctgttgtagtgatatcaactctacacggtgatattaaagggtaggaaacactctaaagtatcaaaaaacgctcatttaaaattatttgcatgcaatttaaaagcatatcttattactaattggaatttgatgttgctatattgaggtctatattaataatgcctgtgaatggtatttttgatgtatttgatatgttatcaatttatattatttacaaactaattgtttcaaataatacatggctgattatacggaaataaataatttcccaccggaattaagtagcagcggtgacaagtattttcatctacgtaactattcggaatattcagaatatactagcggtttttttttgagtttgatgatttttatcaaatcatgactttttcctgaaaagtcagtagatattcataggcaagtaaggttttatactttgctgacaggattcaggcctgtctcagactgacatggatgtaatgaacaaaagggaatggctatggaaaatgagcatcaatacagtggtgcccggtgttcagggcaagccgcatatgttgctaaacgtcaggagtgcgcaaaatgatgcgccaatcacttcaggctgttttacctaaaatttcaggcaataaaacgtcattgctgcgtaaatcggtatgcagcgatctcctcactctttttaattctcctcattcggcattaccgtcattacttgtttcaggcatgcccgagtggcaagtgcataacccgagcgacaaacatctccagagctggtattgccgtcagctgcgttctgcactgttatttcatgagccacggattgcggcgttgcaggttaatctgaaagaagcgtactgccacactctggcgatcagccttgagataatgctgtaccacgacgatgaaccgctaacgtttgatctggtctgggataatggcggttggcgcagtgcgacgctggagaatgtcagctaagcacaatctccagctcgcgcagttcacgccagaagcgttcggcaacgggattcatgcgggtattcatccggtatgcataggcctgaatcgggatcaccagttcgtcccgattcagtacaacgagcttcccgctgcgaatttcttgttggatggcgtactccggcagccaggcaatcccacagccgtcgagggcaacctgctttaaaagctcgctcatcgaagagacaaaaaaggtgctgaaacttaactcactgtggcgcgtcagggtgcgattaatcaatcgccccatgtaggagttgcggctgtaattcagtaacggaaagtgtggctgcgcgaggttaaaaagtgcttctccgtgttcgtcactggcgcagacagggaacaattgagattcaaataagcgaatgtggtcaaacggcgcttccagcaaatcttcgtcgtgaaaggaaaaaatacagtcactttgcccttcacgcagtttatcgaccgcttcatcgacatcaatggcttcaattgcccaggtaaagagcggcggcatctggctgataatggacggtaacagaccgagggaaagagagtgtgcagcggctatcttgattttacgttgcgcgtaatcgctgccgccacgcagctctgccagattgctctctaactgttgcaacagatggcggatctgcgaatggaagattttcccttgttctgagagttgcagcggcgttacctggcggttaaacaattcaacaccaatcgcctgttccagcgcacggatgcggcggctgaatgccggttgcgagacgttgcgactgactgccgcctgggaaaaattgcggcatttttccagggtcagaaaatcataaagccatttggtttcaatattatgcaaaatcgcaccacagtcatccattacgttttactctgtcagccgcccttgcgggcattctacgtccattcgggcggctgacaaccgtttaagccgtttcaaacgttcctttcacgcaggctttgccgtctttgaccatcagtttgccgcgagcgtatacctgctcaatgcgcagttctggcgtcatgaccagcaagtcagcatcattgcctggcagaatttcgcctttcccggtcaggttaaggaaaccggctacgctactggtgagcgggcgcagggcatcgctgatactgaaatcatagtctttgaccagcacctgcacggtttccagcaacgtttcaaaacctgcaacaccgatatgggttaaattcccttcgtcatcgaagaacggctggctaccgttgccgtcggagctgagggtgacgcgtgccagcggaatacccgcctgaacggcgcgggcaataccttcggcaggggcgaccggttcgtcaatgctgctggtgatatcgatggtgccgcctttgcgcgcgaactccagcgcctgctcaaacaacggtacgttgcggttaacgtgggtcggcagcagcttgctgatcggcacatcgcagttttccagcaggtcataaataggctgtaacgcctttttactgtcgcccatgtggaacacggtgacgccaggtttaccgccgagcaaaccgccaacgcgggattctgccgccatattggccaggtgataaacgtccggtgcggcagaacggtgatcagagatggcgcatttcacgccaatcacacgatcgataatcgccacgtctttttccacggaacccgtaatggtgcgggaagggacatgataagcgccggtcagcatccaggcgctgatgccttcttcattgagcgcacgggtcttggcgagcagggattccgggtggcgagagatagagtcggtgcccagcagaccaaccactgacgtgacgcccgcttccgtcaggcgacttagcgccacttccggcgtgcgcgtcgtgggacctgcttcgccgccaccgccaatcaaatggacgtgttgatcaataaaacctgggcagaggatctgcccactgagatcgacaaccgtgcagttcggtacaatgtcagaagggatattgctggcaacggcgataattttgccgttagcgacgaggacatcgcaaattccccgatcttccggcgcatacaaatgcgctccctgcagcagggtaaaaccggctgcggtataatcaatcatggtaactccttgttaaacaataagctgcataacccagatcgacagcaatgcgttaatcacgcagaccgtaatgatatgcgggtaatatttggcattcacttcggctgtccccaggcagcgaccgacattttgcaccgggttgcccattaaatacatcgcgggcagtaaaacggtgacatcgtgaccggttaatgcgccggcggtcgccagactggcggcaacaccgactgcgccgcccatactcattaatgcggctaaaaggacggttgccgcttcaccgggtaatccccacagcgccattacgggttcacagatatgccccacccagtcgagcaggccggtaattttcagcgcctgaatgatgacaaacgccatcaccacgtttggcagcaggttggtcgtggcgatagtaaagccacggcgcgcaccatcgataaacatatccatgacatttttgcggacctgagttgtcatgcttgcgctccttgcgttgggttgcgacgttcttcgaagttaagccagacgcgcaaaatgttggctccgacaaatttaaacaccaggatgacggctaaaggtacgattacggacgtgcccagaaaggcaaacaccgcgacgccggaagagaagtagttggtgatgatggcgctaccgctggtttgatatgcggcgaaaatcactttatcgcgttcggtaatttcaccttcctgcgccagctctttggtcataccggcggcggcatccgtgttttgcaggttagcgatcagcgccagcgagcagatccctggaatgcccaacaacggttttagcacaggtgtcattaactgctgcgcggcgcgtaatccaccaagaccatcggtaattgaaataatccccagagagagaatgactgacggtgccagctccagcgcaaagagaaagccatctttagcccccgcgccacccgccccgcgaaatgaggtggtggctccattcgcaccaggcagttgcccaaacgatccgttcagaacggaaaaatcaaaaacgcgccaccaactgtctgtcccggaaaaaacaccggaaaaaaagattatggtgagaaaaaaagccagataccctttaatgcccactttttctgtcgccagctccccggctacagcatccccttgttgtgtcataacaatccccattgtttttttgtgtttgtgtgttgcttgagccaggaaaattcctggagcggaaaaaccttatcagccatgtgggtatggggaaaatgcaagtatgtttctggctatgcgttttttgcatagcggaaaaattacgctgtgtggaaaaggctctgcgcaggattgagttgcagaaaattcataaacccagtgacaatgacatcagtaaataaaaacagaaaatccagggacgaaaacgagatggcaaagtacaacgaaaaagagctggcggatacgagcaagtttttaagttttgtcctccgacacaaaccggaggcgattggtatcgtacttgaccgtgaaggatgggcggatatcgataagcttatactctgtgcccaaaaagcgggcaagcggttaacccgtgcattgctggataccgtggtcgctaccagtgataaaaaacgttttagttattccagtgatggtaggtgcatccgcgcggttcaggggcattcgacttcgcaggtcgctatttcctttgtcgaaaaaacaccgccacagtttctctaccacggtacggcaagccgtttccttgatgagataaaaaaacaggggctgattgcaggggatcgtcattacgtgcatctctctgctgatgaagcaacggcacgcaaagtgggagcaagacacggatcgccggttatcttaaccgtcaaagcacaggaaatggcgaaacgaggtatccctttctggcaagcggaaaacggagtctggctgacatcaacggttgcggtcgaatttcttgagtggtaagggaaacactcctcatgaagtgaccacttgcagcttaaataattgtactgtgctgataagcgcagcaataaacaacgccgccgcgccgcagagagtggcgccggcaagcgccgatgttccattgccgagcatactggtcagcgccgggccgaggatttgtccaatgccgtaaatgagcgtcacaaagcctaaaagattgagatttcccggaacgctcagttggcgggcgatagtcatcaccagagatgtcgtgcccataaaggtaccgccaaaaccgatactactaatgataagcaagagaggagagtcgctggcgagagtaagcagcacactgatagcctgcaccagcaaattcgccgtcaggcaaggcaaagccccccaacgttttgctgcccatagccagccaaagcagcctggcacaattgataagccgactaacgtccagagatgggcggttaacaatggtgagcctgcatctttcgccatgagcggcaggtaagtcgcgacgatgatataaccaaatcccgccaggccgtacagaatagccagtaaccaccagctcattatctgttgctccgtttttgccaatggcattggtgcgatggcgtgttttttcgagggcattaaaagcgtaagtgcaatcagcatcatgccagaaagcgccccggcgccttgccataacgtttgcgaggataaggcaaaatgcaggcctgccagaacatattcgttgcccagtgcaatgccaatgccaacgccagaaaacaaagctgccagcacaaaaggatggcgcgtgtgctgcataatcagcgtcgaaccaaaaatcagcataccggcgctggcgacacccgccaggaagcgaatcaataacaccagaataaatggcggcaaccatgccattgcgaggatcaacaacccgctcgccagggcagaaaccaacagaaatgggcgcaggcgcgacggctggtgaaatgcgccaaacgaaaatagcagactgccagccagataccccgcatagttgccgctggcaatccacgagagctggctaaatgaaaacgccccttccgccatcatgacgggcaacataggcgtataaaggaagcgacctaatcccatacctaaggtcagaaccagcatcccgaaaagcgcggtgctgaaagaaaagcgttctacgggatgcgaggacgaaggcatgtttaaccttgtatgtcatttttgttgttaacaagttaataacaaaaaggtgaaatatgccagcctgttaatgcgatgatttaggggtaaagcgataaaaacgatttggttcgctaacgatataaatattaccagaggcatccatcgcaatcccttcggcctgtttgatgttatgcgacaaacctcgactacctttggttagtgatatttcaccgataacctcgccaaccagggttacttcctggagtgcgcgagattcatgagacagcaccagaagcgtatttttttgctggttaaattctgcgccggacacatcatctaaagtaaattgccgttgtagtgcctcgtctttgctgatgtgtaattcattgctacttaacagcccgttaactttgtagacctcaatcggatttttctctttaaaaaaccagaaagtgtgatcctggcgagaataagccaacccttcaaaaccgcaattggttggggagtcttgcagcgggatttttatttttttgaggatttttacttccgagtttggggtcagtgaaatcacataaatggcgtaatcgcgctcatcgctaatgacaaactgattatcgccaatgtattcgatcgtctcgagatccttaacaaaatccagaggaattgtgcggataaaatcaccattggtggtcatttcaacaatggcggcaggtttgttgatagtgctaaaaagagtattgctttgtgccgaccaggtcagcgaagagatattattcgttatgcctgcaatttctttgccgtcaatggtggcgtggtaattctgaaatgatgctgcatgattgcttttacgggcgcaagattgcacgaagaaagtacacactgccacaatggcaaaaagaatcacaataacggagatgcgtttacttaacgaaatactttttgtcacggtaatccctttaaggcaaatcaataagatatcgagaagtatacgtagcgaccttaatgaatccttaacgcggagaaaccccgtaatgtgcaatgcagcgccagacaccatcctgctggcaataaattgactcagtctgcccagggatcacccattgtatttcctcgccggggggacaggtcagccaaatgcataacccgcagccgccgcgtaaatcacggggaatatcgctgacgcgaaaagtcatgcccgctgcctgcaacgccttgcgggtttgtatgacgccgaccgtggagtgaaataaaaataaaaactctttcatcggcgtgtcctcactcgttgaccaattaccgccgcgccaattgcgccagcaaattgcgcatcaggatgggtatttaccggcattcccaggtgagattccagcatccgggcaaacgtctggcaatgactaacgccaccagtaaacagaatcggcgcttcacaggagagacgagcaatgaaattggcactcctccgcgccatcgcgttaatcactccggcgagaatcgcttctggcgcgacgcccgctgagcgcaggctgatcacttctgattcagcaaacactgtgcacatactcgtgatggcgtgcggcgtgacattttcggtaatgctgtcgagttgctcgacgctggtgccaagcgtgcgcgagatcacctccaggaaacgcccggtgcccgccgcgcatttgtcattcatcaggaaatcgcacaggttaccgtcatcatcaagctgaatcactttgctgtcctgaccaccgatgtcgattaccgcgcgcgttgctggcgcaagaaaccgtgcgcccagcccgtgacaggagatttccgtcacttgtttatcggcaaaatccaccagttgccgtccgtagccggtgagcgtcagaaacggcgttgtctctaacccttcgcgcagagtttcccaggcttcagtaattgctgttgccgggcgaaagggggttggaacgaggaaacggcgcgtaatcacgccgtctgccagtaagatccctttggtggcggtagaaccagaatcaatgccaatcgaatatgtcactgccactccttacagcatctcaataaaggccgcgacacgggtactgagctgcccgaaatccgaggtggagtagtctgtttcaatagcgatataaggaatgttgtgctgctggcgcacatgacgtttaatcgccagcgattccaccgcgtaggtatggcacgcctgcaaaatcacatcaactacgccatcgacctgatattcttccaccatctggctgagcattttcaggcgctgatcgttcggcgaaacacaggagcagccaatcgccagatatttatccgccagcgcgtcgtagacatcgcccgtttctgccacgcattgctcggtcgctttcgccccggtgcagttttcataaccgaccacccagccgccattctcttcaatcgcgcgcaccactttctctgctgcgccgccaatcgggcagccggtgattaaaaggcgtggacgcgggtccagtcgctggccttcttcccactgctgacgaatgcgggcggtcatcgcgtccagttcattgatcaacgcctctttatcgaaccgaaaggttgcgccgtaaaccactttcagaatgtcgctgccgctaagcgccggaggatttaactgcccaagatgataaaaattggccagtgcgcgacgttcgcggtttttcagcgcaatagcatcgcgcagagcatcttcgctaatctcgtgcccaaaacgttcttctaccgttttttgcaagcgcagcatctcagctttccataatgcacgcgaggcatcgtccttaacgctgttcggcaactgcatcacatgaacaggcttaaactccgccatgtattcatacattttctttttgccgtcgcaggtggtttcaccgaccaccagatccgaaaagtagaagtaggggcatttatcggttttgccgaagccgtagctacttttaatcagcgggcagaggttgcgcggcagatctttctccgcttcttcaatggtttcatcagaggtggaacagagcgaaaccacaaccgcaccggctgccatcgggatctcttgcggcataaaggtgcagtaggtgccaaccagcggaatgccgcgctccttgagatccatgacggtgagaaagcctttctggcgagcttcagagaactgatcgaaaatggcgggtagatcggtgacaagtgacatgattttccttccccgtaccacgggagataatgaaaagaggccacattattaccattcttttagtgtggtttatttgatctctctcgcggttagccacttagtttttcatggatttctaaaaattgccgagggggaacaaggccggtagctgcgacagcaaatataaaattagcccaatacaaccgccgaccagcgtaccgttgacacggataaactgcagatctttgccgatatttaactcgatttgccgcgacatatcccgcgcatcccagctttttaccgtgtcgctgatatggcgcgtcaggaatgcggaaaactcaggcgcgacgcggtgcgcggcttgttccagatgaccatttaacgacgcccgcaaggcatcatcggcaattaacgtttcgccaaaccattgacccgcccgcgcgatacgttctttcacacgagaatcttcactgttgatatccactttcagccattcccgtaaatccccccacaattcactgagatagcggttaaaagcttcatcttctttcagataactttttacggcatcggctcgcgctgccatttcaggatcgtttttcaacttgtcgatcagggcaaaggtggcgcgatcaaatgcatggcggatctgatgcgcacgatcgcggctgatatcatcaagcaaagaattcaccgcgtcagaaaccaactccgcgctatgttcgcccagccattcagtaggcaaaattttggctttcagcggatgctcgctctccagccagcgaacaatttgctgggcaataaacttgcgcgatttatcgcgctggagaagggcgatcaactgtgcgatcagcgtatccagcagcacctgatgacgattgtttttggtcatactctccagcatcaacgcactggttccggaaagatcgaccttatcaatcgcccgatggaccgcgcgcttaagcaggcgctgaatacgcgcatcatcggtcagttcaagaaaaccgctcatgatctgcaacagatgctgaccaacgcggcgggcgttctccggctgactaaaccagttgccaatcaacaacgccggttcgtgacgtcgaatcaatgccaccagcgactgggtatcgagaaatttttcctgcacgaactgaccgagattttcgccaatccggtctttattacgcgggataatcgccgtatgacgagaaatgatcggaatcggcacgcggcgaaacagcgccaccaccgcaaaccagtccgccagcgcgccgaccatcgccgcttcagcaatcgccttcacgccgctcacccaaaaattgggcggcaaaaacagcgtaacgacaaaggtagcagcggcgataagcagtaaagagagcgccaacattttggcgcgtctgagttcaatgagtttattcataacgttaagaatagagcctgacggcaggatcgcgcaaaaatcaccgctcctccgccagctcggcagcctgatgttggcgcacgcgattgagcaatcctgccagggtgaaaacgacgataacgcccgccacgacggctaacagatgaaacggcaagcgaccgccgttaaaccacagccagcggccgatttcgaccgagacagacatcaccatcaggatcaccatattcagcgatgcggagacggtccctttcggtaagttattggaaaaaagcgtaaagcggaataaggtcgggaagatcaaaccaatcccgaaagcatacagactggtgcccagcaccgaccacagccagacgtgcggtgacagcagattgccgataatcaacagcgcgaggccgaccagttgaatgggtacggcacgccagataaagcgcggttcggtcggatctttaacgaaacgcgccacgatggcattcgcgacaatcaccgcgccgaacaccggaacctgtgtccaggcgaactgcgaagttgttaagccgcccgcgtcgatcaggatcaccggcgagacagccacccaactcatcattgggatatagcttaaagagatggttgctgcgccaaagaggaacagccgattgcaaaagacattacgaaaatcgcgcaagacgcttttggcgctaaatggaaccgcgccgcgcttcaccgtctctggcatcgccagcagtaagccaacaaatgagataaaacccataaccgcaatgatggcaaaaaggactttccagtgcacaaagtgcatcagagctgcgccggaaagcgggccaataatcggcgcaatcagtacgatggaggtgataatcgccatcaacttaatcccttttgtctgtccgaacgcctcctgcaccgtgacataaccaacggtagcaataaaacagatactggtgccctgaattgcacgcgcgataagaaactgtgtcatagacgtggtgaacattgtcgcagcgcaggcaagggtaaatattagcgccccggtaatcagcaccggcctgcggccaatcctgtcggaaagtggccccagcagccactgcaacgccataccgccagcgagatagagactgacggctgccggggccagactgacatcggcattaaaatcacggaccacattaatgatccccggctggatcagatccgtcgacaggtacgcggcaaagtcatacaaaatcaacgccatcgggaaaaacagcgtggcggcatggcgggcaaaaaaacgtggcataacaaacaactccttgtccggagaaccccaatggggaaaacgaaattcaataccgtcggtaatgacgaaaggcaggcgagaaggacaaatgtactgaatttcatgtaatcaaccactctgcctgtgaacacacagacagagaaataccttctgattccaggtcagaatgtataacgattacaaatagtcatcagcacattacacctcttgaattgatgggttgcatagaaaatatacaccttaagtgtaattaaaatttgcggttaatcaaaagagcgcggtggaaaggggaatatctgccgggtatttgccggagagacttctgcttcgaacggttgtgcaatagaatacgtgtcagtcataactgctattctccgataatagtgattgtgatgagcggtgcgggtgtgttggcgcacatccgcaccgcgctaaatacctggatatatcatcagtaaatacagggaaagtccagctaaaaatagaataaaatggtcagttcctggaatgatttaaatatatttatgtgagttatgattggcgtgaaataataaaaggcgcaccggaaaggtgcgccagaaaataatgatcaggattttttacgcgaggcttttttacctccgctggctgcgcgttcagctttgattttttccagcaacgcggcggcgctgttttctccgctgattaattccgggttttcggcccgccactgggcggtgagttcaccacggaacgcttttgccaggatggattgcgtcaggttgttaacgcgggctaaggcgttgttgacctgtttttctatggtgtctgcgtaggcgaagagctgctcgacgcggcgaacgatttcgtgttgttcggggagtggaggaacagttattgggtatgcaattaatttctgtgcattaatatttgattgactgaccccatcagattttactgagtagcaatattgcctccccaaaatgctatttaaatggtagttaagatagtcagggtttaaatcaggtaaacattgaaccctaatcaaataacctgcataaatagctggttgctctgatttatatatggctgttttcccgacaagttcaggactatttgtacgattgaataatacatcattgtactcaagtttatacttttcaatttctatggtatctgaagtatagactagatccgtccagtccaattttccgccctgaagattgcccattcttaatacaggaatgagtccttctttattagacttagatgacgttccataacttggtttttttataaattccccaagtttgccttctatccacccagacaggctcgaattatctctccagtcttcagttagttttccacttaccgcggcacccagcaccgcctgacgaaaacgtttcaggatttgtgggatttgctcaagacgtgctttggtgctctctacctgcgccagcagcgtatcgagtttttcagcgatgattttttgttctgaaattggaggaagttgtatttcccaagcctccattccagctttggtaatatgtggcattgccacgccgtgagccgatgctttaagtgcctctgtaatattcaataatgcataataagcaaattgcttattaagtgcaggggatgtttcaatcttccaaatatggtagtgataaattagtttatgatcccacttcgaccaatatggaccaaatgttgctgaccaagcatataggagatcatttttatagcaatatttatcttcctgtagctctaagttggaataaaaccatttattccctccattcaaattttgaattctgagaataggaacaccttctgtgagcatttcttctttcttatatgctctgccattgatgagggtcaaaacatcacccaactggcatatttgccaatttttactcattccttcaccccaccaaacgcttcttccagcaactgacgctgtgcatccgcctcatcgctcgcccccagttcacgcatcagcgcatccagttcacccagcgcctgtaccagttcgcccatcgcttctgccgctaatacatccggctccggcaggttgtcggcgtcaatgctgtctttatctttcagccaggagatatccagcgaatcggatttcgcggagcggatccactcgcggctgaacttgcgccagcggctggtagccagatgctgatcggtatttttgttctcttcgctgtcggcaacttccgtctcttcggcgttaaaactccattccccttcagtacgcgggcttaagccgtggggatcttcgccatacacgcgctcaaacggctgcaaatgctcgtcggtaaacggcgtgcgtttaccaaagctcggcatattggtccgcaggtcgtacacccacacgtcgtcggtgcagttcttatcctgatgcgggttcgccactgtgcctttggtaaagaacagcacgttggtcttcacgccctgcgcgtaaaaaataccggtcggcagacgcagaatggtgtgcagatgacacttatccatcaggtcacgacggatgtcggtgcctttgccgccttcaaacaacacgttatctggcaccaccaccgccgcacgaccgccgggatgcagcgtttcgataatatgctgcataaagcacagctgtttgttgctggtcgggtgaacaaaggtgcgggtaatgttggtgcctgcggcgctgccaaacggcgggttagtggcgacaatatgcgccttcggcaggttttcaccgtcgctgcccagggtgttgcccagacggattgcgccgccgtggtcgaggttgccttcaatatcgtgcagcaggcagttcatcagcgccagacgacgggtgccgggcaccagttcgaggccgataaacgcgcggtggatctggaaatcctgtgtgtcgccatcaaggtcgtccagatcgttagtctgcgacttaacgtagcggtcggcttcaatcaaaaagcccgccgtacccgctgccgggtcctgcaccacttcacgcggctgcggtttcagcagatgaataatggttttaatcagcggacgcggggtgaagtactggcccgcgccagacttggtttcgttcgcgttcttctgcaacagcccttcgtacatatcgccgaagtcatcgcgcgacttaccgtgcgcaccgttgtaccagtccagtgaatccatattgctgaccagttcggtcaactgttttggctgggtaatggtggtgttgacgttctggaacaccgcctgcaccagcttttgattgtcggcgcccagatgtaccagcaggttacggtagaactgcaactgctcctgaccgatacgggatttcaggtcgtcccagcggtagccttccggcaggtattccgcttcctgtctggtttctttacacattttcaaaaacagcagcgaggcgagttcattgacgtagttttgataggaaacgccgccatcgcgcaggttgtcgcacagcttccacagcttggcgaccagatcgttattgttcattgtgagttccgtaaattaagcagcggcccaaatttattgggccgcataagaataaattgccgagggtaatatacacaaaatcattcaggttgcatcaaggcggcaagtgagtgaatccccgggagcgtacagaagtacgtgaccggggtgaacgagcgcagccaacgcagaggcagcctgaaggatgaagtgtatacgtgtcaggccagctcgtcccagatataatcgctgaatttatcgagcaggttgtcgagattatcgtcaaaggttctttgcagcatcgccttcccgccgcgacggtggaagttgccggttttgaagacatcgtcgtcgagcaccactttctctttcagcgcctgtgctaaacgatcgagccagcttaattgctcgctgctccagtcgttttcgcccttgatgcgcgtcagcgcgtgatcgacacgttcctcaaacggtttcagcgcatcgcccaccgcagcgcggcgaatatgtccaatcaaccgggcggcaatatcttcattacgcgtctctttccacgctttgcgcagggaagattcctcaaagtgctggcggtcaaaccactcctggagttcgaccagccctttacgggtgagatcgcgcgggcgattgatcaccgcctgcaatgccggttgcgcgttcggggaacgttgcaccagcgagtcaaaggcttcgaggaaatcctgcggcgtgtcgtaatcaccgtacagcgattttacgctcaacacttcatcgtcgatatcgaggaagatcggcgcatcattcaggttattgatatcagttttcagcttttccaggcgggcgataaagccaggcagcttgttaaagacttcggcgctccagtgcggccctttttcccgcaggcgcgaggcgaagccgttaaagcccacccccgccgcgtcctggcatagctcatccagacgacgcacctgtttatctatcgtttcgctgcggtcacggttaaacgtggccaggccgatgatgcgctggagcttcgccaccagttgttcatggctgtgctcggcaaaactgcggccatccgcttcggtgattttataggtttctgaatcggtaatttcgttgaccagcgtttgcagctccaccttaggacgcaccaccaccggacgcatggtgtcgacgctctccagcgtgctgtatatatcgacgcagtcgaaaatcttaaagctggttttattcacgtccgggcacaagcgcgtggcgcggcctttcatctgctcgtacagaatacggctgcgtactttacgcaggaacacgatgttacagatcgacggaatatcgacgccggtcgtcagcaggtcgacggttaccacaatattgggcagccgctctttattgaagcgggtgatcatggtctgcactttgcgcgcgtctttatcggcatcaccggtgatcttgattatcgcgtcgtgctccagttgcggatactttttcttgaacgcggtacgcaactcttccaccaccatatcggcatgggcattggtgacgcagaagaccagcgttttttgcgacccggtcgggtcaaggtagttggtgagttcgttacagacggcgcggttaaacgccgggatcaccaggccacggttaaagtcggcgacctcaaaatcctgatcgtcttccagggtgtcgttgattacttccccctgcgggctgatgcgctctacctgttcgcctttggagagataaacaccctcctgtgcgttgcgggtggtgatctgaattggtggatcctggtcgatcagaaaaccgtcgataaccgcggtacggtaggtataacggtaaaccggctcgccgaaaatctgcaccgtatgcaacgccggggtggcggtgagggcgatttttatcgcatcgaagtgatcgagaatgcgacggtaggcagagacataatccagctggctgcggaactgtagttcgccttcggtctgctctttatcgagaatatagccgcgatgcgcttcatcgacgacgatacagtcgtaacgggccaccggcatcggttcatctgattgcagggtgcgtttcaccagcgactgtacggtggcaacgtgaattttggtgctgtcttccgggaatttatccgtcagccctttaatgtcgaaaatgctgttgaaggtgtcgccgttaatacgcgtatcttcaaacgcccccagcgcctgctcgccaagagaacggcgatccacaaggaagagaatgcgtttaaaacgctgggactggatcaggcggaacatcatggcaattgcggtgcgggttttaccggtaccggtcgccatcgccagcaggatctcttgttgacccttgacgattgccttttccaccgcgcggacggcatcttcctgataataacgcaggcccagctcgctcatgccgggattatcggcaaaccactgattctgtttttgcggttcgctgccgagcatttccagcagctcttccgggcgatgccactcgggtaaggctttcgacatattgcgggtatcacgcacgtcgcgataccagatgccacttttagtcttcattgctgcgcggtattcgcgcccgttggtggagtagcagaaggggattttaaaccgttgttggccgctggagtcctgccagctagtttcatactccggcaccgcttcatgcacttcatccggtgagtagtgctcaagcaaggtttcccgcaggaagccattatcgaagcatttactgtagcgatacgactcattgagcttgccgggaacgtcgatatttttacgtttcgcctctaccaccgcgatgggtttgaggccgacaaacagcacataatccgcaaagccctgtttacccgtttcatctttcccggtcggccattcggcaatggctttattgacgccgggttccgggcgcgcgcctttggagaagcgcagggttttgctatcggcctgccagcctgctttacgcagttgcgcatcaatcaggaagcggctctcttcttcgctaaggttgagtgtgcgcttgatggcctgatcggtaatttctttgtggtaagccttacgttcctgttcagtctgtttggccagttccgcgttcttctcggcgagctgtgcttccagcgccgcaaggcgagcctgggtttgcgcttctgtttcctgctgtttgccttccagaatagcgatatagccgttcagggcaaccagcttctgctgttgcgcttcgacttctgcctgagtctgcgctttttctcgcacctgctgttcaagctgttgttttagcgtcagcacttcctggtgatagaggttctcgccacgttctggtaacacaaacaccggcaccgggaagtcataatctttagtgaccagacggtagtaccagacagccaggcggaacccgagtcgcaggcacatctgggcatcgtcgagatcgttgtgatattcgtgcaccgcctggttaccaatgcggcgtaatttgtgaaatacagagagaatgttgtcatcaacgaaggcgattttgccgagttcgcgcaggagatcgtgttgattctcacaaggggggatgttgagtaacagaccaagatgtttcgctgtggcttcgccaaacatacgcattttaattagcgtcgtgttgggatcatccgggtagttattttccgccgcacaggcgatggcataagtgaagtcgttgacgcccttcaggaattcgaagttggatttattcatcattgttattaatccattgctgtgtgggcctgtccaaatatttaaggcccataacgtcttatcttagctttctgtacctttccggacaatgaccggagtcacagcaactgactcatttctaacgtgttcgtctattttggtagtgttatagtagccgaaaaacatctacctgattctgcaaggatgtactatgacggttcctacctatgacaaatttattgaacctgttctgcgttatctggcgacaaaaccggaaggtgcagccgcgcgtgatgttcatgaggctgccgcggatgcattaggactggatgacagccagcgagcgaaagtcattaccagcggacaacttgtttataaaaatcgtgcagactgggcacatgaccgtttaaaacgtgccgggttgtcgcaaagtttgtcgcgtggcaaatggtgcctgactcctgcgggttttgactgggttgcgtctcatccccagccaatgacggagcaggagacgaaccatctggccttcgattttgtgaatgtcaaacttaagtcacggccggatgccgtcgatttagatccgaaagccgactctcccgatcatgaagaactagcaaagagcagcccggacgatcggttagatcaggcgctaaaagagcttcgtgatgcggtggctgatgaggttctggaaaacttattgcaggtttctccttcgcgctttgaagtcattgttctggatgttttgcatcgcctggggtatggcggccaccgtgatgatttgcagcgtgttggcggtactggagatggtggcatcgatggtgtgatatcgcttgataaacttggcctggagaaagtttatgttcaggcaaaacgttggcagaacactgtaggcaggccagaattacaggcattttacggcgcactggctgggcaaaaggcgaaacgtggggtgtttattaccacttctggatttacgtctcaggcgcgtgactttgctcaatccgtcgagggtatggtgttggttgatggggaacgcctggtgcacttaatgatcgaaaacgaagtaggggtttcttcacgtttgttgaaggtgccgaaactggatatggactattttgagtgaaatatcaggccggatgcggctgcgccttatccggcccataaccccttacttcctcaaccccgcaaacgccgcccgaatctcatcctccggcaactgaatcccgataaacaccatcgtgctatgcggtttttcatcgccccacggtctgtcccagtcggcgctgtagaggcgctggacgccctggaacagcaggcggttagcttcgccgtcaatccacagcatccctttgtaacgcagcagtttatccgccgattccagcagcaggttttccatcacgcgggaaacttcgctgatatctaccgggtaatccagttccaccacaatcgacgaaatatcgttttgtttatccgcgataaagtggaaacgcggtttggtgctgacgacgttctcttccagcataaaaccgttggtgttgaacagcaggcccaggtcgatgtcgccgtgggtaacggtgtagaccggtgcacgggcgttgatgcgcgccaggcgttcgcgcagtttttctgcttcgcctgcgacgtcggttttagtcagcagaatacggtcggcgtagccaacctgtgactgggcgatggtgaactggttcatctgctcatcggcatgtaccgcatccaccagcgcaatcacgccgtccagcaggtaacgctggcataaaatctcatgggagaaaaaggtctgaataatcgggccgggatcggccatgccggtgcattcaatgaccagacggtcgaactgaatattgcccttgtcgagattatccagcaggtcgagtagcgcgtcctccagctcgttggagcgcgaacagcagatgcagccgttggtcagcgttttgatctgcgtggcgcggtcaccaatcagttgatcatcaacggagacttcgccgaattcgttttcaatcacggcaatcttgtagccgtgttgttcgttaagaatatggcgcagcagggtggttttgcccgcgcctaaaaaaccggtgagtagggtaactgcaatcgggttcatgctctctccattaacaacagcgcataccgcctttaccatcgccgccgtagcgcgcgttctggcgttcgcggaagaattcttcatagctcatgtacggcttgtcgggatggttggtcttcatatgctcgacgtagttgtcgtagtctggaatgccaatcaacatcttcgccgcctggccgagatatttttttgcctgtcctaagttaccaaacatagttcactctgataagaacaaagccccgccgaagcggggctaaacacggttagtggtgcgaagagatcttcacgccgccttccgggattggaacgtacggtgtttctttgtcagtacgtttgtcgctgttacgcaccttcagccaggttttgaaaccgtagaagatgatgctgtacaccacaatcaggaacagaatactcaggcccgcgttggtgtagttgttcacaacaatgtggttcatgttggcaatttgctgcgccgtcaggtcagtaccgttagcaatcttctctttgtactggcttgccatgtagaagaagccttccatctgtgggttggtgctgaacagtttcagacccagtgcccaggtggtgcagataagcagccatacagccggaacaacggtaacccagatgtattgggtgcgcttcatcttaatcagcacaacggtgcccagtaccagcgccacggctgccagcatctggttggagataccgaacagcggccacaggctcttaacgccgcccagcggatcgaccacgccctgatacagcaggtagccccacagacccacacagcccgcagtaccgatgataccggcaaccagagagtcggtttttttcaggaacgggatgaagttacccagcaggtcttgcagcataaagcggccagaacgggtacccgcatccagcgcggtcaggatgaacagggcttcgaacagaataccgaagtgataccagaagcccatgtcagccatcggcagcactttgtggaacacatgagcgatacctaccgccagcgtcggcgcaccacctgcacggttcaggacagaaggctcaccaatgtctttcgcggtttgcaggatctgctctggcgaaatcacgaagccccaggagctgacggttgccgccgcgtgtgcggtaacgtctttcagctgcgccatgatgatcggcgcgttctcgccacccatttcatgcaggttaggcatggtgatgccaaggccagcaggcggggtattcatcgcgaagtaaagacccggttcgatgatggacgcagcaaccagcgccataatcgccacgaaggactccatcagcattgcgccgtagccaatgaaacgcgcgtcggtttcattagccagcagtttcggcgtcgtaccggaagagatcagcgcgtggaagccagataccgcaccacaggcgatggtgatgaacaggaacgggaacagagcgcctttccacagcgggccagtaccgtcaatgtactgggtcatcgcaggcattttcagttccgggttcagcaccacgatacccagcgccaggccgacgataacgccgattttcaggaaggttgccagatagtcgcgcggtgcgaggatcagccacaccggcagcagtgcggaaacaaacgcatagccaatcagcgcgaaggtaatggtggtgtctttaaaggtcagtgccggaccccagtacggatcgtgagcaatcacgccaccgaagtagatagaggcaaccagcagcacgataccaatgacagagacttcacccacacgccccggacggataaagcgcatgtagatacccataaacagcgcaatcggtacggttgagcaaacggtgaaaacaccccacgggctttcggccagggctttaaccacaatcagcgccaggacggcaaggatgatgatcatgattaagaaacagccaaacagcgcgatagtccccggtactggtcccatctcttctttgatcatctcaccgagagatgcgccgttacggcgagaggagataaacagcaccataaagtcctgtaccgcaccggccagtactacccccgccagcagccacagcgtgccaggtaggtagcccatctgcgcggcgagaaccggaccaaccagcggaccagcaccggcgatagcggcgaagtggtgaccaaacaacacgtaacggttggtcggaacgtagttcagaccgtcgttgttaataaccgcaggcgtcgcgcgcgtggggtcgagtttcatcaccttctgggcgatgtacaaactgtagtagcgatacgccaccagatacaccgacacagaggcgaccacgatccacagggcgctgacgtgctccccccgacgtaatgcaactaccgcgaggcagaatgcaccgatgattccgagaatcacccagggtatgtgcttgaatagttttttcgtatccatagtaaaacctggcattttactcgtcgtcttttggcttacaggtgcggcagctgcgttcgttcacctctgacacttactgttgtaagctcccggggattcactcacttgctgccttcctgcaaaccaaaatccatagagtaatttgttaatcataggccgaagccgttctaggtttgcgttgcgtttgaggaggtaaattgaccgctatcctgcagtgatgttgccagagatacgcgcgcgtaaagtaaggtaaataactgagtggttattttagggatgtaagcggtcaggaatggcggtgagcggttgggcaagaattattcatcgggtggatatgtgattgagatcacaataaaaatgccccttcgacgaatgcgtgaaggggctggagcttaaatcgcagcttccatttccagcatcaccggatggaaacggcgtttaaagtagataagtccgtgaccttctgcactgaggatgatgtttttaatctccaccagatacaccagatgtgtgccaattgcctgcacatcgcggatctcaccttcaagactggccagcgaaccttttagcaccggctgcgccagcggacctttttgccagcatgagaggctaaaacgctcttccatcgccatgcctgtcatgcccgcgaagtggcgtgccatcagttcctgctcatggttgaggacgttgacgcacaacttgccgttgccctgaaaaaccgggttcatcgcactgttggcgttaatgcacaccatcagcgacggtggtgtatccgtgaccgagcagacagccgttgccgtaatcccgcattgtccggtgtcgccctcggtggtgataatatttaccgctgccgacaggctggccatcgcgtcacgaaagcgcaggcgttgttcatctaattgcatcttaacctcctgctgcgttatttcagcagcttatccagcatgttgatatcgtcgttgttgtgcaggtgcggcacagtccagccgttctggtcgtattccgacaggcagcgatcaaccatcgccatcatcttgtccatattgccggagctttgtgcctggcgcagacactgcaggcgaatctcatcctggctaccggagtagttgatttcatacagttcgtggcgaccaccaaactcgctgccaatggcgtcccacatcagtttgaggatcttgatgcgctggacgtgatccataccattcgaaccgcgcacatacttcgccagatactggtcgatctgcggattgttcaggtcacgggcactggaagggaggtagatcaggccactggtaacgttgcgttcgataatgtttttgatcttcgcgtaggccattggtgccagtacgcgataggtttgcagtgcggcatgatccggtaaataagccccgttgacccacggcgtcgcttcagaacacatcgagtcactcaatgcccagaaggtgttgcgccacgccaccacttcaccgagatcggcctgcacaccacggaactccagggtgccggtacattcgagtgattttttcagcagtgccgtaatgaagtcgagtttcactgccaggcgcacacaggcttgcagcggatacatacgggcaaaaccgccttccatcgtccagcgacggcagcgatcaaaatcgcggtagatcagcacgttttcccatgggatcagcacgttatccatcaccagaatcgcatcattctcatcgaagcggctggagagcgggtagtcatacggtgagccggtagcacccgcgaccatctcataagaggcgcgggagattaatttcacgccatcagcatccattggcgcaacgaacatcagcgcgaagtccgggttttcgcccattacttgtgccgagccgaagccaaccatgttgtagtgagtcagcgccgagttggtggcaaccactttcgcaccgctaacgataatcccggcgtcagtctctttttccagcttgatgtaaacgtctttcactttatcggtcggcaaatgacgatcgatcggtgggttaacaatcgcgtggttaaagtagaggccagtttcctgaatacgggtataccagttacgggcgttctgctcgaactgaccgtaaaagcccggattcgcgcccagtgcgcaaccgaaagcagctttgtagtctggggtacggcccatccagccatagctcaggcgtgaccactcagcgatggcgtcgcgttgctggcgcaggtcgtcggcacttttcgccacgcggaagaatttatgggtatagccgccgctgccggtgtcggtgttccaacacagagagtcctgcatctccggtttgtgcagcgcgtcgtacagttgggcaacagacgctgccgcattacgaaatgccggatgagtagtgacgtctttcactcgctcgccatagatatagatctcgcgaccatcctgcaggcttttcagatactcttccccggtgaacggacgttgggtactggcgcggaaatcttctggtttcatgtcgacctctacagtattaatcggaatacgattgttaattttgtgtgttgtttttgttattaaattgaagcttgcaggggcgattacgggaagagacttttgggacaatggctggtacttttcaggtcgggtacggttttgtgatcgaggtcgcttttagcgatttttgacgttactaaatccccttgctccaggcggagaaaggggaatagcaggtggtgcctggtttcccgttaaggctaagggattttcacgtcacaggtacttttttggcacgataagcactgggcgagcaaccgactaagcgataaaaaaagcgcgcaaaataagccggatccttaaaaccgagttgccaggcaatattgttcacggcgttatcagaaaacagcagcagccgcttggcttctcgcagctgcctgtcgaaaatcaaccgttttggcggacggttggcaaagcgacggcagatgtccgtgagtcgtgattcggtgatatgcagttcgttagcgtaatccggtactgtccagtgctgatgaaaatggctttcaatcagcatatgaaaacgctggaacagttttaattctccgcgcatcccgctggcggcatggtcgtcgagttttgcgttacgcagcagtagggtgaacactgcctgtgccaggagcgtcagggtgtgttcccgtccaggcagttgttccaccgattcccgctctatcagttgccaatagtgttccagcgccgccagttcgtcgggtttatctgccagtgacaggcaaatccccggcaggccgaggtttcccgagtgcccggatacagaacttccagcaggggccagatcagatcttcccgtaccgtcaacacatgaccgtcggcgtcagactccgtaataaacgcatgaggtactgacggcggcgtcaggacaaacaggggcgcttccaccgagtagcgatgatcgtcaagctgtagctcaatctgtccgctattgaggaaatgcatctgaaagtactgttcgtggcgatgtggcagcatatggcggccaaaaaatgccgccatgcgggcgaacgactgataatgcacatcatccgtacccaggctttcatcgtactctttgctgatatcaatattggcaatctgacagtcacgcatcgtcgttccttacggggtcgctcgcggacgggaggactgcattggaatcgcccagataatccccgcaccaatcaccagcagcgcggcaacaaaccacaatccactgttaaagctgccggtcagatctttcaaccagccgatcataaacggacttaatgctgaaccaatgttgccagtggcgttgatcaccgcaataccgatcgctcgtgcccgcaggctgatggactgatccggtgttgtccagaaaatcgccattgcgctgaatgatccggtcgaagccataatgatccccagcatctggatcatgttgtgatcagttgccgaagccagtaaccaaccagcggcagcgaacaaataaggaagggcggtgtgatgccttcgttcctggcggtgatctgagtgacggctccagtaaatcatcccgagaatggtacaaatctgcggtacggcggccagcaggccgatggtgatattactgctgccctgattaaagctttgcaggatctgcggtgtccagatgctgatcgcactaagtgtgttggtcaggcagaaatacgccagggtatacatcatcaccaccggagtgaagatctcccgccacatgctgcgttgttgcatggcgtggtggctgatggctccctctggctgaaccagcgtcagacgatcgttatccatcatctcttgcaggcattttttgtcttctttcgtcagccacttagctttgtccggtgagtcatcaagccagaaccacaccatgatgccgagtaataccgacgggaagccttccagcaaaaacagccactgccagccttttaatgccattacgccatccagcgacaaaatgtagccggaaacgatcgatcccaacgctgtcgttaccggcattgccaccataaacaaggcgttggcacgggcgcggaaataggccggaaaccagaaggttaaatacagcagaatgccaggcagaaagccggcttcggtaatgccaaccagtatacgcagtacgtacaagctggtggggccagtggcaaacatggtggcagtagaggcgatgccccaaagcaccatgatggtggcgatccagcgccgcgcaccgacaatactcagcataatgttgctgggaatgccgaagatgacataagcggcgtagaacagggtggtggcgaggccaaacatggtggcgctcagaccgaggtcgcgtcccatcgtgagtccggcaaagccgatgttgatgcgatcaaggaacgagaagataaacagcacgaacagaaagacgatcaggcggcgaaacagcttcttaataaccgcctgttgtccggcagtcagcgctttatgctgattcgccggatcgatactctccggtatggcaggtgaggtgtcgctcatttttcttcctctaatgggatttttgtagggtacgacaaggtttatggcggatgcgcacaaacgccttatccggtccgcgatttggtacggctttttgccggatgcggcgtaaacgccttatccggcctacggtttggtgcgagtgtaggccggataagcgcagcgcatccggcattaatacacgtcgggcttaatcgctgtagcctgcgcaccaaaccgtgctgccagcgcttcggcggcgcgggcgagcagggtggtgtcaacgccgacggcgacaaacagcgcgcccagttccagatagcgttttgccagttgctcattggcgatcaggatccccggcgctttgcccgcttcgcggatctgcacgatcgcctgctcaatcgcggcctgtacttccgggtgctgaggattaccggcataacccatatcggcgctcagatccgccgggccgataaacacgccgtcgaccccttccacgtccagaatctgcggtaagttcttcattgcctcacgcgtttcgatctgcaccagcacgcacatttgatcgttggctttttgcaggtaatcaggaatacgattccagcgcgaggctcgggccagcgcactgcccacaccgcgaataccggcggggggataacgggtggcgcgtaccgcttcacgggcttcgtcagcgttttgaaccatcggcaccagtaaggtttgtgtgccgacatccagcagttgtttgatttgcaccggatcgttccacgacggacgtaccaccggctggctggggtagggcgcaatcgcctgtagctgggtgagcacggtttgcacgttattcggcgcgtgctcaccgtcgatcaataaccagtcgaatcctgctccggccagtaactctgcgctgtagctgctacttagccccagccataatccgatctgcgggcggcctgctttcagcgccgctttaaaactgttttccatcgttctctccttaaacaaagcggcagctaatggagcccatgttgccgtaatcgacgtggaaggtatcgcccttacgcgccggaaccgggcgggtgaacgaaccgccgagaatgatttgcccggcttccagttgtacgtcatacggtgcgagtttgttcgccagccaggccacgccgtttgccggatgatttagcacaccagcggcgacgccagtttcttcaatcacgccattgcgatacatcagggcggagatccaacgcagatccagttcgtctggtttgatcggacgaccgccgaggatcactccggcgttggcggcgttatcagaaatggtgtcgaacactttgcgcgggcgctgggtttccggatcgatgttgtggcagcgggcgtcgatcagctccagcgccgggatcacgtagtccgtggcgttgtagacgtcgaacagcgtgcagtttggcccacgcagcggttttgccagcacaaaagccagctccacttcaatgcgcggcacgataaagcgatcggtcgggatatcgctgccatcgtggaagaacatgtcgtccagcaatgcaccgtaatctggctcgctgatttgtgagctggcctgcatcgctttcgaggtcaggccgattttgtggcctttcagcgtgcggccttcggcgattttcagtcggacccattcgcgctgtacggcgtaggcgtcttcaatggtgatctccgggtaatccagcgagatcgcgcggatctgttcacgctgtttttctgcctgatccagacgctgggcgatcagggtgtgggtgtgtttatcgaacatagcgatatcctgtggcattgccggatgcggctgcgccttatcatccagcctggaagctggtgcaaatttatttaaacaacgcgtgtacgttgttctgtttgaaattcaacgtcgggtgcagctctgcaatctcaaatgaaagcgccaggtaacggctctccatcagtgaggcgaagtgcgttttaatcagatcaaacagcatttcgcctacttcctgacggctttccagactgcgcccgctgccgatttttagcgtcatatgcacaaaggcgtaatcgtgcttgccatcagccatttgccaggtatcgatccagtgtgcccggctacgtattcccccaagcggaaaaatccccgtcgccgccagtgcggtgttaacactggcaaacagctcaggtaagcgggcttcttgacgaatattttcagtacattccacgataaagtgcggcatggtttttccttacgcgggaagcgggaaaacagcgttaacctgaccagtgccagagcttgggaacagctcggtaataaactccaccttgccgtcgtatttatcccagccgagcatccccagcagcatcaccgtgtcgtgcatattgccttcgccgtagcagtagtcggcgtactccggcagcatattgcagaactctttgaactggccttcgcgccacagcttcaccacgcgctcgtccatctggcggtcgaactcgcgggtgtagctgttcatcccttcttctgcacgctgatcgtcaataaagcggtgcgataacgaaccgctggcaaggaccgccacggtgccgtcgtactgttcgatcgctttcagaatcgcttcgcccagcttgcggctgtcggcaaaatcatgaacggtacagaatgcggagatggagaccactttgaagtgcttgtcttcattcatgtagcgcatcggcaccagcgtgccgtattccagtttcaggctgggaatgttgtgcgcttttgcccgcacgccgagctttaaggcttcatcggcaattagctgccccaactccgggttgccctcgtagttgtaggtcatgtcacgaataaaatgcggcagctcgttactggtgtagacgccttcaaaatggtctgcacagttgatgtgataagcactgttgaccagccagtgggtatcgaaaacgataatggtatcgacgcccatttcccggcaacgcttgctgatctctttatgcccgtcgatcgcaccctggcggcaaccgtggtttttcccaggcagctcagagagatacatcgacggtacgtgcgtgatcttggcggctaacgctaacttacccatatcagactccccatttcggaattggatggtcgcccatggaaatgcagacgttcttcatttccgcgaacacttcgaagctgtactcaccgccttcacgcccggtgccggaggcttttacgccgccaaatggctggcgcaggtcacgcacgttctgggtgttgacgaacaccatgccagcttcaatgccacgcgccaggcgtaacactttgctgacatcctgtgtccagatgtacgacgcgaggccgtactccacgtcgtttgccagacgtaagccttcggcttcgtctttaaacggcagcaggcaggcgaccggcccgaaaatctcttcctgggcaacgcgcatacggttatctacgtccgccagcaccgttgggcgcaggaagttgccgcctttcaggtgtgcaggcaggtcagacggtttatccgggccgcccgccagcagggttgcgccttcttcaatgccgagacggatatagccggagactttatcccagtgttgctggctgataagcgccccaacctgggtattcggatcgttcggatcgcccacgcgcagacggttggcgcgttcggcaaagcgtttaacgaattccgggtagatgctttgctgaataaagatgcgcgaaccggcggtgcagcgctcgccgttgatcgagaagatggtgaacagggcggcgtccagcgcgcgttcaatatcggcatcttcaaaaatcagcaccggcgatttaccgcccagttccatggagtattttttcagcccggcgtttttcatgatgttgcgcccggtggccgtaccgccggtgaacgacacggcacgtacgtcatgatgacgaaccagcgcatcgcctgcggttgcgccgtagccctgtaccacgttcagcacgcctgccggaataccggcttccagcgccagctcacccaggcggtcagcggtcagcggggagagttccgacattttcagtaccgcggtattgcccagcgccagacacggcgcgaccttccatgtggcggtcataaacggtacgttccacggcgataccagcgcacaaacgcccaccggctgcaccagcgtgtagttgagcatcttgtcgtcaaccggataggtcttgccgttcatctgctggcagacttccgcgaaaaattcaaagttgtgggaagcgcgtgggatcaacacatttttggtctgatggatcggcaggccggtgtccgcggtttccatcgcggcgatctctggcacgttctggtcgatcagatcgcccagacggcgcatcaggcgcgcacgctctttcatcggcagattggcccatttcgggaacgcctctttcgctgccgctaccgcctgattgatctccgcttcaccgccagaggccacatccgccagcacttcacccgttgccggattggtggtctggaagtagtcgttacctgcaacatttttgccgttgatccaatgagttacttttttcatttcgctgtttcctcactcacaattcggttcaccaggcagcccacgccttctacttccaccactacttcatcgccaggcaccacgtcagataagccttttggtgtgccggtggcgatcatgtcgcccggattcagggtcataaattcgcttaagtaggcgatcaggaagggcacgctgaagatcagatcggcggtggtgccttgctggcgtaactcgccgttgacgaaggtgcgaagggtcagattatgcgggtccgggatcgcctctttcggcacgatggttgaaagcatcggcgtcagtccgtcgcggctttttacccgcaggttagggcggtagtagttttccagatagtcgcgaatggcgtagtcgttacacacggtgtagcccgcgacataatccatggcatcggcttcgctgacgttacgcgcctgtttgccaataactaccaccagctccgcttcatagtgcatgtattcaatattgtttggacgcacggaggtctggttatcgccagtgagggtatttggcgctttcaggaacaccagcggttcttccggtggcttaaattccagttcgctggcgtggtcggcgtagttcaggccgagggcaaacagcgtgccgtgcgggtgtggctgcgttgggaagctcttgcgcgtggtcacttcacgttcgtccactaccggattttccagcggcgggaaaccttctgcgagaacacgaacgcgatcgcctggctgtatttccacgcgcgcctgtggcgtgccgagcagaatggcatcgcctggattcagtgtggcaaattcgctcagggcgctcagcaactgcgcggcgttacgttgtaaatcggcggtattccagtgatcggcaggacgcccgttgatctcggtatagatggtcagattatcgacattgctgagagccacggtttcgccaatggggcagaatccatcacgacattttgctttgattgccgggcggtaaaagctctcttccggcaggctgacgtcgttagccagcgcatatccggcgatgtactctgccgcatcttcttcacgtactttcgtcgccgtttttcccacaatcagcgcaacagtcgcaccgctcagtaccttttcaccctgtggaaagggaatcggttcaccgcaaccaatcaccgtattgcgcggtttaataaaccagaccgcagttttaggcggggctttgtagggggattgctggaacgcttcctgccatgcatcaagttggctgcgatggttcaacgctacggcgaagatagtgcctttcattaccactcctcggattcgatcatcttaatcattaatatgttaatgattacttttattcccgattgcgtagtttggcaaaagtaagtgatgtaaatgtgatctaattaacaaactatttacatttaaagataataaaatattaaatatcagtaagttaataaaatatcatcaattttgataaaatcaggaattgcagggacagcgcagtcccggtaacgtgacgattaactgtttctatattaatgattttgaatttttcaggggaaagataatgcacgactctctaaccattgcgttgctccaggcgcgagaagcggcgatgagttattttcgcccaatcgttaaacggcataatttgactgagcaacagtggcgcatcgtgcgtattctggcggaaagcccatcaatggattttcacgatctggcgtatcgtgcctgcattttgcgcccaagcctgaccgggatccttacgcggatggaacgcgacggtttagtgttgcgattaaagccgatcaatgatcagcggaagctctatatctcgctgaccaaagaggggcaggcgctgtataaccgcgctcagacacagattgaagaagcctatcggcagattgaagctcagtttactgccgagaaaatgcaactgttaacccatctgttagaggaatttattgctctgggcaattcccgacaagaagacatcccgggcgataatgaataactttttagtatctgataaccagcccctggtttttccatggatggcgggttacaccttttcataaagtttttgctttccaggccgaaaatcttgcatcggtccacaggaaagagaaaccatgttaaaacgtatcaagatcgtgaccagcttactgctggttttggccgtttttggccttttacaactgacatcaggcggtctgttctttaatgccttaaagaatgacaaagaaaatttcactgttttacaaaccattcgccagcagcaatccacgctgaatggcagctgggtcgcgttgttgcagacgcgtaacaccctcaaccgcgcgggtatccgctacatgatggatcagaataatattggtagcggttcaaccgttgctgagctgatgcagagtgccagtatttcgctgaaacaggcggaaaaaaactgggcggattacgaagcgttgccgcgtgacccgcgtcagagcaccgccgcagcggcagagatcaaacgtaattacgatatttatcacaatgcgctggcggagctgatccaactgttaggtgcaggcaaaatcaacgagttctttgatcagccgactcagggatatcaggacggtttcgagaagcagtatgtggcttacatggaacaaaacgatcggctccatgatatcgccgtcagcgataacaatgcctcctacagccaggcgatgtggattctggtgggcgtgatgatcgtcgtactggcggtcatcttcgccgtctggttcggtattaaagcctcgctggtagcgccaatgaatcgcctgattgacagcattcgtcatattgcaggcggcgatctggtgaaaccgattgaggtggatggctctaatgagatggggcaactggcagagagtttgcgccatatgcagggagagctgatgcgtaccgtcggtgatgtgcgcaacggggccaatgccatctatagcggtgccagcgaaatcgctaccggcaataacgatctctcttcgcgcaccgagcaacaggctgcttcgctggaagagacggcagccagcatggagcaactgaccgcaacggtgaaacagaacgccgagaatgcgcgccaggccagccacctggcgttaagtgcttctgaaacggcgcaacgcggcggcaaagtggtagataacgtggtgcagactatgcgtgatatctccaccagttcgcagaaaatcgccgatattatcagcgtaattgacggcattgccttccagaccaatattctggctttgaacgcggcggttgaagcagcgcgtgcgggtgagcaaggacgtggttttgcggtggttgcgggagaagtgcgtaatctggcccagcgtagcgcccaggcggctcgtgaaattaaaagcctgattgaagactcggtggggaaagtggatgttggctctacgctggtcgaaagcgccggggaaacaatggcggagattgtcagtgctgtgacccgcgtgacggacattatgggcgaaattgcttctgcttctgatgagcagagccgtggtatcgatcaggttggcttagcggttgctgagatggaccgggtaactcaacagaacgccgcgctggtggaagaatctgccgccgccgccgccgcgctggaagagcaggccagtcgcctgaccgaagcagtggcagtgttccggattcagcaacagcagcaacagcagcgtgaaacatcggctgtggtaaaaaacgtgacgccagctacgccgcgtaaaatggcagtggcagatagcggggagaactgggaaacgttttaatcgccataaaaatgcccgataagcaaaatgttatcgggcatagggagtttaatctttacgcgggtcgttgatcggctgacgaaccaggaagatgtacgccagtgctcccgctgcggtgacgcaaccgcagatgattagtgccagacggaatgagtgggtggtatcaacaataaaaccagtaatgatcggcgcaaaagaggcgcagatgaagctggcaaagttctggatactgcccaccgacgccgtcatgcgagaagcaactgcgacgtggatcaagccccagcaggatgttccggcaaagtgaatacagaacagtgccatgccaatcagcagaaccgccgtcatggatgttgtcgcttgcggtacgaccagcgtaaaggcggcagaacagaacatcccggcaataatgcagatcttacggcttttaatcggagccattccccctttgaccagccagtcagtaacgtaaccgttgaccagcatcccggcagccccaaacaggaaagggatagccgccatcaaccctgtgctttttaaatccaggttataggctgtttgcaggtaaccaggaagccaggccagatacagccacgcagtgtagttgatgccactgaatccgagcatcattccccacattgtgcggttacggaacaggctgcgccattcggcaaaactgagcggatctcggcgggcattgacgctacctgcattgagataagcttgttcaacggcagtcagttctacgtgctcgcggttgcgatagagcatataccagccaatggcgagaaaaatccccagcacaccaatggtaataaacatcccacgccagcccatcaccagcatcatcgccgccagaatcggtgggcttacggcaacgccaatggtagaagctgcgttgaagaagcccatcgggcgtccgcgctctttgatgttgaaccagtcgttaatgacttttacgccacatgggttcatcggcgcttcaccaatccccataccgatacgcaccaacacgaactgcgtaaagctgtgcaccatgccagacatggcctggaacagtgaccagaagaacatccccagtcccagcatcaggcgtgggcctttacgatccaatagtgggccgcaaggaagttgcgcaatcccgtaagcgagtgaaaacacggagagcaaagcgccgatttcggtggcacttaatcccaattcttcacgaatcgttaaatttgctaccgacagcgaactgcggtcgagataattgattaccgccgcaaaaaataataacaacatggcggtggtttgaatgcgtttaattcgggtactgcgttgaactaatccatctggtggcacgggaatatctgccgacgaagatggagtaaatgaagaacgcggatcgagggtgatattttctttttccacgccggactcctgtatttataattttaattgtttacgtaattgtgcattacgcaaggttgacattaacggcaggttaaagttttaggactttactaccgctcacaaaaacatttttagtcgactgattgtgagcataggtaagcgggaatttcccggtatttatcttttgataaaaccgtgcacccgctaatagtttgctgtttttaatccgtacttaatgagcataacgcgtgttctcattaatggatcgaatcattgattgtttagctgaattcaaatggttacggagcgcaagggtggcatcaaggtcactgcggcaaatcagagcgctgagaatggtcatatgctcatcgacggcaatgatattgcgctgtttaagatcgctttcgtcccattgatagtgaaaatgaaagatgactgagatgatctcaagagattgatcaaaaaagatattgtcggcagctgaaagcagtaaggagtgaaaatctctgtcaagttgcgagaacatgcgaaagctattgccgatgttgtcacgcagtagccgatgacgttcgagcatggttttcgcctgcagccagcggggatcatgatcaggcaggttgagaaagtgctgaagtgaatgtgtttcgagcatttcgcgtagttcaaacagctgctcggcgtaggattgatcgaattgcttcatgctccactggccgcgcttttcgctttgaataagattataacggccgaattttaaaagatattctcttactacaaccgggctgacacccgcggcccgagccagttgcagttcagaaaaagtttccccagggcgtaactggcgctggtttatcatcgtgaaaaaagcctgctcaaacactttgttttgttcactcattgaagcggtagtacaggcgaaaccgtcatcatggtcaggtttacgcgcaatcacatagtcgtttccaacctgcgttaagacgccgcattcgcgtaagtggctgagaatatgacgcactgtagtgcggctgatgttgtacatttccgccagcgcactttgcgatggaagtggggaagggatatgaccccgcgccatatcatcaatgacctggttaatcacattgtggcgtaaattttgtgaacgactcatattttcctccttgtgagtccattaaaacccgatttaaaacatttttatgcgtgtgttttcacaaaacagattttccgttccgctgccatttttcattttcattgatatctaaggcaacaaaaaatggagagccgaatcatgtctacgatgaatgttttaatttgccagcagccgaaagaattagtctggaaacaacgcgagatacctattccgggtgacaatgaagcattaataaaaattaagtctgtcgggatttgcggtaccgatattcatgcctggggtggaaatcaaccattttttagttatccacgtgttttaggccatgaaatatgtggggagattgttgggctgggtaaaaatattgctgatcttaaaaatggtcagcaagttgctgtgatcccttatgttgcctgtcagcaatgcccggcgtgtaaaagcgggcgtaccaattgctgtgaaaaaatttcagtcattggcgtgcatcaggatggcggttttagtgagtatttgagcgtgccggtggcgaacattttgcccgcagacggtattgacccgcaggcggccgcattgattgaacctttcgctattagcgctcatgcggtgcgtcgcgcagccattgctcccggcgagcaggtgctggtggtcggggcggggccaatcggtctgggcgcggcggcaatcgctaaagctgatggcgcacaggtggtggtggcggataccagtccagcgcgccgtgaacatgtggcaacgcgtctggagttgcccgtgctggacccgtcagccgaagattttgacgcgcagctgcgggcgcagtttggtggttcgctggcgcagaaagtgatcgacgcgacaggtaatcaacatgcgatgaataacaccgtgaatttgattcgtcacggcggcacggtggtatttgtcggcctgtttaaaggtgagttgcagttctccgatccggaattccataaaaaagaaacgacgatgatgggtagccgcaacgccacgccggaagattttgctaaagtcggtcgactgatggcggaaggaaaaatcactgctgacatgatgttaacccatcgctatccgttcgccacgctggcagaaacctacgagcgcgatgtgattaacaatcgtgagttgattaagggtgtaattactttctgataaggcgagattattaaagttgccatgcagcgtccggggaagtgttgggcgctgttttttttctgtttctcaatgatgttttgtaggccggagaagatgtgtaggtcgcaccttatgcgacctacacatcagtcagaaattacccttcacgttccacaactttaatttccaccatgccgatcccgagcttacgcggcgagtgtccgaggatattcccttcgttggttgagacaggttccggcggcacaattaccagtgtgtcggcatcggttgggttatcgaaatgcagtgtggtggtggtcacttcattgcccagcacaagagtttgttcttcattgcctacgcgtaccggaataggacggctggcgttattgccgtatgctttggcggtaatcaccaggtcaaatttcttcggcagcggatgcttgtactcgatttttacttcatcgcccagctgcgcgttggaccagcggccccacgactctggacgggaaatcccactaaactgtttcacctcttctggcgcaccggcgacgttgaagatgaaactgtcggctttgtagcgaatatcgttatcaacaattttcagcgtatcgacattgcctttataacgcgccatgtcgatgaccgtatctttaaatgccgttttgccctgccatgttgttttgtcaacatgctgaacaatttgctgaccgccaagctgcccttgcgagacacaccagtcggtggagagtgccagttccggagcccagagttgtgccatcttatagcaacggtcaacccagacgaaattgtcgcgtggagcgaaatcggccagctggaaacgcagcggtgctgagtattcgctttccggcagcggttccacgcgtttgtctgaaacccgcaacagcagcggcaaacggaaatggctacccgagaaggcaattatgtttttctgctggtcgatggtgaactctttcatctctttagggaatttccacaggcggatgatatccggcttccacgccaatgttttctctttgatattgaggaagatttccgacattgactgcccggataaactgctacgaccaagtccgagatagttatcgccaccgagaatgtccagcaccgtcgcgccgttatccatcgtgttacgcttcactgccagcgtctcttgctgcggcttgtcgccacgaatgacaaaaaacaggttattgcgatcctgcttattgaggtatttccacgccgtgttgttcatcgctaaatggtcagaagagacgacgatgacggtatctttaaaccacggtgacgctttgattttgttgataaacgccgcgatattctcctggctgcaacttaccgcgctgaatgactggttcggcttaccgtcaaaatcatattttttgcggttacaggtacgcgagataaaaccatccgggtgatgggtatcgactgtcagggtaaacagtgagaatcgctgacctgagcgggaaagctcttcaaactttttccacgtttcatcgagaacggtatcgtcgtagaatccccagtcgttgcgatagtgcgggtcggccaccacgcttttcagctcttctgagccgtataagtggtcgaagccatgcgacttcaggaacacatctttaccggcaaaacgcagattcgcgccctgcacgaaatagttctgataacccgagtttttcaggatatcgcccagacagatgttctgcgggaagaagctggagacagaggcggaggcgttgccttcaaagggggcaaacagcggtatgccgcactgagaagccaccatgcccgcaatcgtgtaatccgttcctggcagctgctgcgtgtggctgaaatccaggccttcatttttcaacgcgcccagttcaggcgtgagatccgggaaagcttcgttatcaaaataggtccgctcgagactttcgccgtagatataaaccaggttgagtttcgggtcagggatagttttcgacggctctttataataagccgcaaagtccgggtcgccatcgcgtgactgggatttcaccagttccgttatctgacgaaatgccgggctggcgtccaccgaacccagcgccagtaagagcgccagcaggctgtaaccaaaatggtgcggatgatggcgacgacggcgcaggatccagcccagcgcaccgaacaccgctgtcagccccagcacaatgccgatacccggcaggatgtatttgctgacgccagcaccggtcaggctgttggttaaggtatagagaaccgcgtcgttaataccagcgccagtaaaatagtcgctggcaaacagggtgatatttaaaacgacaaatagccccagcaccgttaatgtggctgcaaaccaccaggtgttacgtcccgctttccatgcgtaaatcagcacagaggcgagaaaaagggcgaaagagagtagttctgacaacgggcgagcctcactaaaccgggccgtttagccaacgtttaagctttttgagaagcacaatgtaatggcgtcgccatattgctgcaattctagtgtcaaaaaaatgcgatgttgttaggaattagtttataaacagacttttttgatcgcggtcgcttcccgtgtaacagggggaaaaccgtccaggagcagggaaaagggcaggagagagccgcgtcagccgggtaacagctaaaacgcggcgtttcgcggttcaggaaatgaagttcagcccctgctttaacaccagatcgcaggctttggttttcaccttttctgccagcggagtcgttccgatgttatccagattgagttactgaccatctttggttttcagcaaaccctgaatgccatccagatagttggtgtcttctttttgttcttcactgttcaggcccagcttttccagcacctggttcttgatgttttcggcatcggttaccgacgccagcttttgcttcgcgcagtattgcagaatgcctgcggcgttgttcatgttatctgcgcttaaggcctggttcccgctgctaagcaagttagttaatgacgcgagcgaccaaccgccttcctgtgtcgtgctgttttggttgccaagttcgctggcggcgctggagagcgcatctttccaggacgcagcatgcaccccagtggaaattaatgcgctggcggcaatggcacagcacagaagatgtttaacagttttcatcatcattactcaaggtggaattgtgtcgcagtataccgccagaaacggggattaatactctttacctgttacccggctacggtagctatcccagttgaagatcacccacaaactgttacccaggcgcatacggtccatcacgcgttcgcccagcaacttggtcatctcttccatattactgttggtcagcatcccggttgggcgtttggaagaagagcggcgatcgacgatctggttgatgatcactttttcgtatttcgattcggtctgcacgccgatctcatcgatcaccagcagatcaacgttgctcagatcgttaagcagttgttcttcgctggtaccgctattcctgaaggtatctttcatcgccgacataatatcggccacggtgatgatcaatacggatttaccgcgtagcagcagctcgttgcagattgccgccgccagatggtttttgccggttcctggcttaccagaaaagatgaagctggcgatgttgccgtcaaactcttcgacatactggcgcgctttgcttaacgcattcatctgcccttcacactcaacgcgatagttctcaaaggagcagttctgatgcagtggacgaataccggagcggttaaaggtgcgctgcattttcatcgcccgattttcacgttcgagagcggcggagcggatcgccccttgttctttctgccaggccagtagctcttcacccgttttgaatgcaggtttgatatgggcaggcatcattttttgcaggcgttgcatcaggtcgccaacgtttttcatcgttaccctctgaatcctggtggaatttggctgtcaggttcgctgaccgtattcacatctcgtttcggcagtccgccgttgctggcacgaccgatttgcaggctgcgcgccagtttttgttgccactgcacatggtgaaagactttaccttccgcctgccagtaggcaatgaatgaggccagttcttcggtggtcaccggctctcttagcgccacgccccatagcgccgccaggcggataaagtcggcatcgggttgccagtccggatacatggcgaatttccccatggggacagcaacgggagcggcttgcggttcctgatagagttgatcgtccagagcgacatcgcttcccggacgcgccagcttttcttccagcgccagcagttcagccaggcgtgcaggcgtgacggcataaaacgccggggcattgttagcaaatacggcaaccacaccgccttcagcttttgccagaacggtttggtgatcgtgtaccagggcgtcaataccaacgacgtccggggtcaaaactctggaagacatactgtttctcaaatatggaacgatgaacgagaagggagataacttttatagtaacacacggaggagaggaggctgtctctcatccgtgtgcttaagcgaggcaattttatacgcgagggcgcttgcggtacaaccataatccaggaatggaaagaccgatggataacgcaccaacaatcgatgaagctgtaagaaagttggttaacagggtaatcatcaacggttcgctgtaacctaactggctgatttttaccgccgaaatcattgcggtataagccgatatgcccgggaacatagggataacggccgccacggtaaacactttcggatgcgccagataccagcgcgaccattgaataccaatggtgccgaccagcatagaagccataaaagttgaccactcaatattcagcccgctggtcattaagatcattcgtgaaccatggccaatcgcgccaagcagcgcacaccagcgtaacgcccgcacgggaacgttgaacaccatcgcaaagccgaccgctggaatggcggcgaggatcatatcctgcgccaatgcaaacagaaactcgatcacacccatccgcgtagcccccaaatcgtcagtgccatcactacgccgacgcaggtagccagcgtcagcagactggcgatcgcccagcgtgccagtccggtattgatgtggcctttaaacatatcggcgacggcattaatcaacggaaagcccggcaccagcagcagaacgctggcggccatcgcaatggtgggtgtatcgctgaaagtggggagttgcaaaagcaatccggaaatggtggtggcggcgaaagcggtaaggcaaaagttgatctgtggatgaagatgacgttgtgccagcagctggcggatatacatcgcggtcgtactggcaaagaaggtgatgacggcaccatcccagccaccgttattgagtttacagaaacaggcgcaagaaaggccaaccattaaggctaccagccatcttgggtaacgtaatggctgaatttggctaaatcgtttctctacgcctttgtaatccagcagatgatgctccgcaagaatcacaatgtgctggacttcagtcaccacatgcatattaatgccgcgatcgtgattttttcgtgtcgatgtcaggcattgcccatctttaatagttgtcagcactatggcgttcgaagagatagaactttcgacgctgtccattcccaacgcccgacccagtcgtgaggaaagctcatcaaccaacgcgctttccgcaccatgttgcaaaagaaataatccacactggatacaaagccgcgttacggctcgctgttgctcagtttgcataactcgccctttgtcatagacgtgctgcgtattgttcagataatgagaatccatttgtatcatgaagcacggttgttttgcggtaggttaagatcaaaattgcgctgattaatcctggttatcgggacaagctcggtgataaaaagcgaattatctctcgccgcaaacaaactatcacatgaatattatcactataatgaatttattgttttagcctttacgggtcaggataatagatagctgggcgcgttttttagtgttaacaagttaaaatcatcagattttattgaataaatattgattgtgtgattcccgcattctgcgggaagggatatcatttaattataaattaaatgaatgtgatttctgtttttcattaagtattcctaacaacttaatgtagatattttaaatatctccaggctatttcaccaggttatcatttgatgctaaccttctgacacatgcagtggagttgttgtgcagcaggagtatgctgatatgaaagtgaatgctaaggataatttattcgcttaatctattaatttgctggaaacatttaaggaatgaatatcctgaataaaccatcataatttttagacagtggatgtggaggaaatatgttgccaggatgctgcaaaaatggaattgttatcagtaaaatacctgttatgcaagcagggttaaaagaggtcatgaggactcacttccctgaatatgaaataatatccagcgcctctgcggaggaccttaccttattacaattacgtcgttccggattagtcattgctgatttagccggtgaaagtgaagatccacgttctgtttgtgaacattattattctttaatctcacaatatcgggaaattcactgggttttcatggtgtcacgctcctggtattcccaggcagtagaactgctcatgtgccctacggcgacgttattgtctgatgttgaacccattgagaatctggtcaagaccgtacgttccggcaatacgcacgcagagcgtatcagcgccatgctgacctctccggcaatgactgaaactcatgattttagctatcgctccgtcattctcactctttcagagcgcaaggtactgcggctattaggtaaaggatggggcatcaaccagatagcttcattgcttaagaaaagtaataaaactatcagcgcccaaaaaaacagtgcgatgcgtcgactggcaattcacagcaacgctgaaatgtatgcatggataaatagcgcgcagggtgcaagagaacttaacttgccttctgtttatggagatgccgcagaatggaacacagccgaattaagaagagaaatgtcgcactcatagaaaaatgcgtcatgagtagtatcggtattgagagtttattcagaaagtttgcgggcaacccttataagctccatacctataccagtcaggagtcatttcaggatgccatgtcgcggatctcgtttgcggcggtcattttttctttttctgccatgagaagtgagcgcagagagggattatcttgcctgactgaactggcgattaagtttccgcgtacccggcgtttagttattgcggatgatgatattgaagctcggctgattggttcattgtcgccatcaccgctggacggtgtattaagtaaagcgtcaacgctggagatttttcatcaggaactctttttgtcattaaatggtgtacgtcaggcgaccgaccgactgaacaatcagtggtacattaaccaaagccggacgctaagcccgacggagagagaaatattgcgctttatgtcgcgtggctactcaatgacacaaattgccgagcagcttaaacgcaatatcaaaacgatccgcgcgcataaatttaatgtgatgtcgaaactgggcgtcagttctgatgcaggattgttggaggccgcagatattctgttatgtatgcggcattgcgaagcaagtaatgtgttgcatccctattaatccgcatgatgccgggtttacttccccggcagtgctttcatttcagcgtacaatcgccacattgctgcacatccggtaagcgataacgctggcagcaagtgcggcgcaccagcaggccgtcgcgcagtaccacggtacgccagagtggattatcttcaccgttcgtgagcgttttctcaaaaaagatggcatggcgcagcgattcaaccgtcgcctcgccgagcagttgcttcatctcagtgagataccagttgatcaaataaccggtattactccagataagtttgccgttgatctctccggtcgcttctagtgcctgcacaaccggaaccagcgcctggctgattaacgtttccattcgctgctgcggcgaatgtggtgttgcgtttttatcgtcacacacatcgacccagaaacaggcggcacggccggtttcgtgaaactcagcatggaaatgttccggcgacacatctaatgctttttcctgcgtcagtagcgccagcattaatggtggcaccatcaggccgatataccattgtgcccatagtgagatcagcggtttgttctcgcggatcatcgttggttggttgcgatagatatgatcggaatagaccgcgagtagagaacttagcgcattcggtgatgaccattgcgccagcgtcatggcgttaagcggagcgggttcatccaggcggataaactccagcaaatgttcacgatgttcggcgatcgtcgcacgtacggcttgtgcaagcccagcatcctgtggctggagatgcgttcgccagatgatatcttcatagagcggtgcggaacgataggccataatcgtgatagtaatctaaatgataatgattgctaatcctagcgataggtttacccgatagcaagggatttctctggcttgcaaatgataaaaattatcatatgatattggttatcattatcaatgaaagagatgaaaccatgttgcaacgtacgctgggcagtggctggggagtgttgctgccgggattgctgattgcagggctgatgtatgcggatttatcgccggatcagtggcggattgtcattctgatgggattagtattgacgccggtgatgctgtatcacaaacagttacggcattacgttttgctaccatcgtgcctggcgcttattgctgccatcatgctgatgataatgaatttgaatcagggatgaaaaatcaaggaagaaacaagaaaggaagtaaagataattggtgcgaggggggggacttgaacccccacgtccgtaaggacactaacacctgaagctagcgcgtctaccaattccgccaccttcgcacagtcatcttacttttttgatatcgcctcgtttggtgcgaggggggggacttgaacccccacgtccgtaagaacactaacacctgaagctagcgcgtctaccaattccgccaccttcgcccagtgcgagcaatatcaacgtggtttttggtgcgaggggggggacttgaacccccacgtccgtaaggacactaacacctgaagctagcgcgtctaccaattccgccaccttcgcataccatcaattcttaaaaagaattgctaccacggaggcgcattctagtggttttcagcttttcgtcaatagttaattatcgccggaggtgtaattgctgaaaaaatgtccatcaggaaactaacgtgcaggtttggtagttttgtaggtcggataaggcgttcacgccgcatccgacacggtatttgggtgcagatgccagatgcgacgcgggcgcgtcttatctggcctacgaagggctaacgtgcaggttttgtaggtcggataaggcgttcacgccgcatccgacacggtattcggcgagataattaacctttcttcgcctggcgggtcataatggcgcgatacaccttgaaacgcccggtttgcgcaatcacttcatggaagccaaatgtctcatccagcacgtccgggtaaggcaggaaggcgttcgctacaattcgcagctcgccgccgctattaagatgacgcaccgcgccgcgaatcagcgtttgcgccgcatccaggctggtttgcatcccatcgtggaacggcgggttggagatgatcatatcaaaacgacctttcacctcggaaaagacgttgctggcaaagacttcaccttcaacaccgttggccgcaagtgttgcgcggctggcttctaccgctggcgcagagacatcgcacaaggtgagacgaattttcggcgaatggcgcgcaaaggcaactgaaagcacacccgcgccacagccgacatccagcactttacctttcgtgtgcggggttaacgtcgagagcagcaactggctaccgacatccagaccgtcgcggctaaacacgccaggcagcgttttgaccgtcaggccatcgacgctgtattcgccccagaatttatcggcatcaaataccggctgtttttccagacgaccaaaatagaggccacagcgacgagcgctgtcgactttattcaacggcgcataatctgccagcatctgctcggcgctgcgcacgccgctgcggttctcgccaacgacaaaaatatctgtccccactggcagcagagaaagtaaattcatcaactggaactgggcttccggtttgttcttcggccagtagtaaatcagcgtatcgcaatctgcgacgtcatccaccgtggcgaccagactgaaacgggcgttatcccccatctggcggcttaatacctgccagtggtggaattgctgggtatgagcacggctggccgcggtatctaaacgcgcgggcaggtcatcctgtaagtctccggcaaacagaatacggctttgttcgaaatcatcactgtgacgcagcaagacttcacttgccggggtaaatgcagacatggaatgctcctcaattgatactggcggcgattatagccatatgttggcgcggtatcgacgaatttgctatatttgcgcccctgacaacaggagcgattcgctatgacatcccgacgagactggcagttacagcaactgggcattacccagtggtcgctgcgtcgccctggcgcgttgcagggggagattgccattgcgatcccggcacacgtccgtctggtgatggtggcaaacgatcttcccgccctgaccgatcctttagtgagcgatgttctgcgcgcattaaccgtcagccccgatcaagtgctgcaactgacgccagaaaaaatcgcgatgctgccgcaaggcagtcgctgcaacagctggcggttgggtactgacgaaccgctatcactggaaggcgctcaggtggcatcaccggcgctcaccgaattacgggcaaacccaacggcacgcgccgcgttatggcaacaaatttgcacatatgaacacgatttcttccctcgaaacgactgatttaccggcggcttaccacattgaacaacgcgcccacgcctttccgtggagtgaaaaaacctttgccagcaaccagggcgagcgttatctcaactttcagttaacgcaaaacggcaaaatggcggcgtttgcgattacgcaagtggtgctggatgaagctacattgttcaatattgcggtcgatcctgactatcagcgtcagggattgggaagggtgctgctggaacatctgatcgacgaactggaaaaacgcggcgtggcgacactatggctggaagtccgtgcctcaaatgctgccgccattgccctgtacgaaagtttaggctttaacgaggcgacgattcgccgcaattactaccccaccacggacggtcgcgaagacgccatcatcatggcgttgccaatcagtatgtaagacaaggtggaataatgaagtgggactggattttctttgatgccgatgaaacgctgtttacctttgactcattcaccggcctgcagcggatgtttcttgattacagcgtcacctttaccgctgaagattttcaggactatcaggccgttaacaagccactgtgggtggattatcaaaacggcgcgatcacttcattacagcttcagcacgggcgttttgagagctgggccgaacggctgaaagttgaagcaggcttgcttaacgatgcctttattaatgcgatggcggaaatctgcacgccgctgccgggcgcggtttctctgcttaacgccattcgtggcaacgccaaaatcggcatcatcaccaacggctttagcgccttgcagcaagtgcgtctggaacgcacgggcctgcgtgattacttcgatttgctggtgatttccgaagaagttggcgttgccaaaccgaataagaaaattttcgattatgcgctggaacaggcgggcaatcctgaccgttcacgcgtgctgatggttggcgacactgccgagtccgatattctcggtggcatcaacgccgggcttgcgacctgctggctgaatgcgcaccatcgcgagcaaccagaaggcatcgcgcccacctggaccgtttcttcgttgcacgaactggagcagctcctgtgtaaacactgattgcctcccccccgttgatgggtaaaatagccgcaatttttcgttttcaacaagcgcggcgcgatgccgcttactcaagaagaaagaattatgacgttgtctccttatttgcaagaggtggcgaagcgccgcacttttgccattatttctcacccggatgccggtaagactaccatcaccgagaaggtgctgctgttcggacaggccattcagaccgccggtacagtaaaaggccgtggttccaaccagcacgctaagtcggactggatggagatggaaaagcagcgtgggatctccattactacgtctgtgatgcagtttccgtatcacgattgcctggttaacctgctcgacaccccggggcacgaagacttctcggaagatacctatcgtaccctgacggcggtggactgctgcctgatggttatcgacgctgcaaaaggtgttgaagatcgtacccgtaagctgatggaagttacccgtctgcgcgacacgccgatcctcacctttatgaacaaacttgaccgtgatatccgcgacccgatggaactgctcgatgaagttgagaacgagctgaaaatcggctgcgcaccgatcacctggccgatcggctgcggcaagctgtttaaaggcgtttaccacctttataaagacgaaacctatctctatcagagcggtaaaggccacaccattcaggaagtccgcattgttaaagggctgaataacccggatctcgatgcagcggtcggtgaagatctggcacagcagctgcgtgacgaactggaactggtgaaaggcgcgtctaatgagttcgacaaagagctgttccttgcgggcgaaatcactccggtattcttcggtactgcgctgggtaacttcggtgtcgatcatatgctggatggcctggtggagtgggctcctgcgccgatgccgcgtcagactgatacccgtaccgtagaggcgagcgaagacaaatttaccggcttcgtatttaaaattcaggccaacatggacccgaaacaccgcgaccgcgtggcgtttatgcgcgtggtatccggtaaatatgaaaaaggcatgaagctgcgccaggtgcgcactgcgaaagatgtggtgatctccgacgcgctgacctttatggcaggtgaccgttcgcacgttgaagaagcatatccgggcgatatcctcggcctgcacaaccacggcaccattcagattggcgacacctttacccagggtgagatgatgaagttcaccggtattccgaacttcgcgccagaactgttccgtcgcatccgcctgaaagatccgctgaagcaaaaacagctgctcaaagggctggtacagctttccgaagagggcgcggtgcaggtgttccgtccaatctccaacaacgatctgatcgttggtgcggttggtgtgctgcagtttgatgtggtggtatcgcgcctgaagagcgaatacaacgttgaagcagtatatgaatcagtcaacgttgccaccgcccgctgggtagaatgtgcagacgcgaagaaattcgaagagttcaagcgtaagaacgaaagccaactggcgcttgatggcggcgataacctcgcttacatcgctaccagcatggtcaacctgcgcctggcgcaggaacgttatccggacgttcagttccaccagacccgcgagcattaattcttgcctccagggcgcggtagccgctgcgccctgtcaatttcccttccttattagccgcttacggaatgttcttaatacattcacttttgcttatgttttcgatgatatcccgagcggtttcaaaattgtgatctatatttaacaaagtaatgacatttctgacggcgttaaataccgttcaatgcgtagatatcagtatctaaagccgtagattgtcattctaccgatattaataactgattcagaggctgtaatggtcgttattcatcacccatcgcttttgtgatggcgaccattgacttctgtagagggtgaagtctctccctattcagcaatgcaacctcgtgttgccaggctcaaattacgagcaaacttacaggaataaatcgatgactatgacaagactgaagatttcgaaaactctgctggctgtaatgttgacctctgccgtcgcgacaggctctgcctacgcggaaaacaacgcgcagactaccaatgaaagcgcagggcaaaaagtcgatagctctatgaataaagtcggtaatttcatggatgacagcgccatcaccgcgaaagtgaaggcggccctggtggatcatgacaacatcaagagcaccgatatctctgtcaaaaccgatcaaaaagtcgtgaccctgagcggtttcgttgaaagccaggctcaggccgaagaggcagtgaaagtggcgaaaggcgttgaaggggtgacctctgtcagcgacaaactgcacgttcgcgacgctaaagaaggctcggtgaagggctacgcgggtgacaccgccaccaccagtgaaatcaaagccaaactgctggcggacgatatcgtcccttcccgtcatgtgaaagttgaaaccaccgatggcgtggttcagctctccggtaccgtagattctcaggcacaaagtgaccgtgctgaaagtatcgccaaagcggtagatggtgtgaaaagcgttaaaaatgatctgaaaactaagtaattcgtcgtaattcgtcctcccgaactttgtcgggaggcgcgatgtgcaccacactaaaaatatcgcattgagtgattttcacgctcatatcaagcggtgacattaactatggtaaaggagacgcttatgtttcgttggggcatcatatttctggttatcgcgttaatcgccgccgcacttgggtttggtggtctggccggtaccgctgcaggcgcagctaaaattgtctttgtcgtcgggattattctgttcctggtgagtttgttcatgggccgaaaacgaccctagatttcagaccattaagaaaattttatccaaagccagtccagcggactggcttttgcggttttagcgaataataaattgcgttactttgtcattctttcacaacaaaaacaggaaggcagaggtggggcagcgaatacctgtaacgcttggtaatattgcgccgttgtcgctaaggccgttccagcctggacgaatagctctggtgtgcgaaggcggcggacagcgtggaattttcacggctggcgtgctggatgagtttatgcgcgcgcagtttaatcctttcgatctttatctcggcacatctgccggggcgcagaacctctcggcgtttatctgcaatcagcccggttacgcgcgcaaagtcatcatgcgctataccacaaaacgcgaatttttcgatccattgcgctttgtccgtggaggaaatcttatcgatctcgactggctggtggaggccaccgcaagccagatgccgttgcaaatggataccgccgcgcggttgtttgacagcggcaaatcgttttatatgtgcgcctgtcgtcaggatgactacgcgcctaattactttttaccaaccaaacaaaactggctggatgtgattcgcgcctccagtgcgatacctggcttttatcgtagcggagtgtcgctggaaggcattaactacctggatggcgggatcagtgatgcgattccggttaaagaggcggcaaggcagggcgctaaaacgttggtcgtcatccgcactgtgccgtcacaaatgtactacacgccgcagtggttcaaacgcatggaacgctggctgggtgacagtagcctgcagccgctggtcaatctggtgcagcatcatgaaaccagctatcgtgacattcagcaatttattgagaaaccaccgggcaagctgcggatattcgaaatttatccaccgaaaccattacatagtatcgcgcttggcagtcggattccggcgctgcgtgaagactataaacttgggcgtttatgcggtcgttatttcctcgccacggttggcaagctattaactgaaaaagcgccgcttacccgccatctggtgccagtggtgacgccggaatcgatcgttattccgcctgcgccagtcgccaacgatacgctggttgccgaagtgagcgatgctccgcaggcgaacgacccgacatttaacaatgaggatctggcttgatttgccgttttatcgatacccactgccattttgatttcccgccgtttagtggcgatgaagaggccagcctgcaacgcgcggcacaagcgggcgtaggcaagatcattgttccggcgacagaggcggaaaattttgcccgcgtgcaggcgttagcggaaaaatatcaaccgctgtatgccgcattggggttgcatccggggatgttggaaaaacatagcgatgtgtctcttgatcagctacagcaggcgctggaaaggcgtccggcgaaggtggtggcggtgggggagatcggtctggatctcttcggcgacgatccgcaatttgagaggcagcagtggttactcgacgaacaactgaaactggcgaaactctacgatctgccggtgatcctgcattcacggcgcacacacgacaaactggcgatgcatcttaaacgccacgatttgccgcgtgctggtgttgtccacggattttctggcagccagcaacaggctgaacggtttgtacagctgggctacaaaatcggcgtaggcggtactatcacctatccacgcgccagtaaaacccgcgatgtcatcgcaaaattaccgctggcatcgttgttgctggaaaccgacgcgccggatatgccgctcaacggctttcaggggcagcctaaccgaccggaacaggctgtgcgggtgtttgacgtgctttgcgagttgcgcccggaaccagaagatgagattgccgaagtgttgcttaataatacgtatgcgttgtttagcgttagtgggtagtttacccttcgtaggcagcatccggcagtcggcgcataatgcctgatgcgacgcttaacgcgtcttatcatgcctacaggtttgtgccgaaccgtaggccggataaggcgttcacgccgcatccggcagttggcgcacaatgcctgatgcgacgcttgacgcgtcttatcatgcctacaggtttgtgccgaaccgtaggccggataaggcgtttacgccgcatccggcagttggcgcacaatgcctgatgcgacgcttgtcgcgtcttatcatgcctacaagtctgtgccgaaccgtaggccggataaggcgttcacgccgcatccggcagtcggcgcataatgcctgatgcgacgcttgtcgcgtcttatcaggcctacaggtttgtgccgaaccgtaggccggataaggcgttcacgccgcatccggcagttggcgcacaatgcctgatgcgacgctggacgcgtcttatcatgcctacaagtctgtgccgaaccgtaggccgcatccggcatgtcacaaatacagcgccggaaatatcaaccggcccaccccgcgcacctttaatgcatcagccaacggctcaacgtcttccggcgtggcgctcgcccagctttgcgcctcgccatacacgccgtgggcatgaaacgcgttcaggcgtaccggaacatcgccaagtcccttgataaacgccgccagttcttcgatgtgttgcaaataatccacctggccagggattaccagcaaacgcagttccgccagcttgccgcgctctgccagcaaacagatgctgcgcttaatctgctgattatcgcgtccggttaattgttgatgacattcgctaccccatgctttgagatcgagcattgcgccgtcacacaccgggagtaatttttcccagccggtttcgctcaacatgccgttactgtccaccagacaggtgagatggcgcagttgcggatcgtttttgatagcagtaaacagcgccactacaaacggcagttgggtcgtggcttcgccgccgcttaccgttatcccttcaataaacagcaccgctttgcggacatggctaagcacttcgtccacgctcatggattgcgccatcggcgtggcatgttgcggacacctcttcaggcaggtatcacactgctcgcagaccgcagcgttccacaccactttgccgtcaacaatctgcaacgcctgatgcggacactgtggcacgcactctccgcaatgattacagcgccccatcgtccacggattgtgacagtttttgcagcgcagattgcagccctgcaaaaacagagccagacgactgcctggcccgtcaacgcaggagaaggggataatcttactgactaaagcgcatctgctgttcatggcttatcacgcgcggctggcgttccagaatacgagtgttgcgtgcggcttcttcgcccagccaggtggtgttggtgcgtgaaccttcggcgcgatatttttctaaatccgacaaacgcaccatataaccggtaacgcgaaccagatcgttaccgctgacattggcggtaaattcacgcattccggctttaaaggcaccgaggcaaagctgtaccagcgcctgcggattacgtttgatggtttcgtcgagcgtcagaatgtcgctgatgccggaataataataagcatgatgcggggcgacagtttgcagatgggtgatcggatctggctcatcgccatagggtaaacgcgcgcccggcgtggtgccgatatcggaactgatccccgactgtgcgtgtaacatggcgcgtttttgccagccatatttcacgggggtattggcgacaaactccgccagttgcgcgctgatgcgataacccacttcatttgcggcggcttctttaccgtagcgcgcggcaatcccttctttctcacacagcaagttaaccgcttccgccagcccatacatgccaaacattggcacaaaacgttcagggttaatcagcccttctttcaccaggaagctattctcaaagaagtgtgattgttgatagaggaattcacaccgcgcatcgatgatggcgatctgctgctggcagtagtgcggtagagtgcgcgtaaagaagtcatccagcgattcgctgcgctcggcaatggctttcaggttaaggcgtaccagcgtgctgccaccacccgccagcggcagtgagttgtaacagctcacaatcccgtagcccccttttgtgaaaattttatcatgcaccggaccgttggcgatgtgcggtttgctacattcacagatgttcttcgccacttccagcagtaggtcatcaggggtgatttcaggatcgtagataaaggtcaggttcggtgaaacctgcttcaactctgcgtctgcacgtaagattgcacgggtaatgggcgaatcagacgggccgatattggcgtgcataaaggcgtctggcagggttctgtcgaggtaacgccagaaacgttttattcgaatatcgatctcgtcttgtgttagaattctaacatacggttgcaacaacgcatccagttgccccaggtagaccggcatcgatgtgaccgacggtacgtggtggtaaagaatggtcagcagagagagtgcgtcatcaagatctttcgcgccttccagctccagccattcggaaccgttcgccagaaaacgggcgtaatcgggtaagacatagcgcggtttgtacggcgcatgaccttcaaacatatcgcagattacaccctcatccagcgcacggcgggcttcggcaggcagctgcggataaggcagattgttttctgcttcaagtgccagaaaatggcgcttctgctccgggctaagcactgggctggtgacaatttgctggcaacgttgttgcagtgcattttcatcagaagtgggcatcttcttttccttttatgccgaaggtgatgcgccattgtaagaagtttcgtgatgttcactttgatcctgatgcgtttgccaccactgacgcattcatttgaaagtgaattatttgaaccagatcgcattacagtgatgcaaacttgtaagtagatttccttaattgtgatgtatatcgaagtgtgttgcggagtagatgttagaatactaacaaactcgcaaggtgaattttattggcgacaagccaggagaatgaaatgactgatctgaaagcaagcagcctgcgtgcactgaaattgatggacctgaccaccctgaatgacgacgacaccgacgagaaagtaattgctctgtgtcatcaggccaaaactccggtcggcaataccgccgctatctgtatctatcctcgctttatcccgattgctcgcaaaacgctgaaagagcagggcaccccggaaatccgaatcgctacggtaaccaacttcccacacggtaacgatgacatcgaaatcgcgctggcagaaacccgtgcggcaatcgcctacggtgcagatgaagttgacgttgtgttcccgtaccgcgcgctgatggcgggtaacgagcaggttggttttgacctggtgaaagcctgtaaagaggcttgcgcggcagcgaatgtactgctgaaagtgatcatcgaaaccggcgaactgaaagacgaagcgctgatccgtaaagcgtctgaaatctccatcaaagcgggtgcggacttcatcaaaacctctaccggtaaagtggctgtgaacgcgacgccggaaagcgcgcgcatcatgatggaagtgatccgtgatatgggcgtagaaaaaaccgttggtttcaaaccggcgggcggcgtgcgtactgcggaagatgcgcagaaatatctcgccatcgcagatgaactgttcggtgctgactgggctgatgcgcgtcactaccgctttggtgcttccagcctgctggcaagcctgctgaaagcgctgggccacggcgacggtaagagcgccagcagctactaagtaagatgctttacgcctgatgcgctgcgcttatcaggcctacgagacgtatctacccgtaggccggataaggcgtagacgcatccggcaaaagccgcctcatactcttttcctcgggaggttaccttgtttctcgcacaagaaattattcgtaaaaaacgtgatggtcatgcgctaagcgatgaagaaattcgtttctttatcaacggtattcgcgacaacactatctccgaagggcagattgccgccctcgcgatgaccattttcttccacgatatgacaatgcctgagcgtgtctcgctgaccatggcgatgcgagattcaggaaccgttctcgactggaaaagcctgcatctgaatggcccgattgttgataaacattccactggtggcgtcggcgatgtgacttcgctgatgttggggccgatggtcgcagcctgtggcggctatattccgatgatctctggtcgcggcctcggtcatactggcggtacgctcgacaaactggaatccatccctggcttcgacattttcccggatgacaaccgtttccgcgaaattattaaagacgtcggcgtggcgattatcggtcagaccagctcactggctccggcggataaacgtttctacgcgacccgtgatattaccgcaaccgtggactccatcccgctgatcaccgcctctattctggcgaagaaactggcggaaggtctggacgcgctggtgatggacgtgaaagtgggtagcggcgcgtttatgccgacctacgaactctctgaagcccttgccgaagcgattgttggcgtggctaacggcgctggcgtgcgcaccaccgcgctgctcaccgacatgaatcaggtactggcctccagtgcaggtaacgcggttgaagttcgtgaagcggtgcagttcctgacgggtgagtatcgtaacccgcgtctgtttgatgtcacgatggcgctgtgcgtggagatgcttatctccggcaaactggcgaaagatgacgccgaagcgcgcgcgaaattgcaagcagtgctggacaacggtaaagcggcagaagtctttggtcgtatggtagcggcacaaaaaggcccaaccgacttcgttgagaactacgcgaagtatctgccgacagcgatgctgacgaaagcagtctatgctgataccgaaggttttgtcagtgaaatggatacccgcgcgctggggatggcagtggttgcaatgggcggcggtcgtcgtcaggcatctgacaccattgattacagcgtcggctttactgatatggcgcgtttgggcgaccaggtagacggtcagcgtccgctggcggttatccacgcgaaagacgaaaacagctggcaggaagcggcgaaagcggtgaaagcggcaattaaacttgccgataaagcaccggaaagcacaccaactgtctatcgccgtatcagcgaataacggtatactgatctgatcatttaaatttgaagcactgagtacggagaacatatgaaacgtgcatttattatggtgctggactcattcggcatcggcgctacagaagatgcagaacgctttggtgacgtcggggctgacaccctgggtcatatcgcagaagcttgtgccaaaggcgaagctgataacggtcgtaaaggcccgctcaatctgccaaatctgacccgtctggggctggcgaaagcacacgaaggttctaccggtttcattccggcgggaatggacggcaacgctgaagttatcggcgcgtacgcatgggcgcacgaaatgtcatccggtaaagataccccgtctggtcactgggaaatcgccggtgtcccggttctgtttgagtggggatatttctccgatcacgaaaacagcttcccgcaagagctgctggataaactggtcgaacgcgctaatctgccgggttacctcggtaactgccactcttccggtacggtcattctggatcagctgggcgaagagcacatgaaaaccggcaagccgattttctatacctccgctgactccgtgttccagattgcctgccacgaaggaacctttggcctggataaactctacgaactgtgcgaaatcgcccgtgaagagctgaccaacggcggctacaacatcggtcgtgttatcgctcgtccgtttatcggtgacaaagccggtaacttccagcgtaccggtaaccgtcacgacctggctgttgagccgccagcaccgaccgtgctgcagaaactggttgatgaaaaacacggtcaggtggtttctgtcggtaaaattgcagacatctacgccaactgcggtatcaccaagaaagtgaaagcaactggcctggacgcgctgtttgacgccaccatcaaagagatgaaagaagcgggtgataacaccatcgtcttcaccaacttcgttgacttcgactcttcctggggccaccgtcgcgacgtcgccggttatgctgcgggtctggagctgttcgaccgccgtctgccggagctgatgtctctgctgcgcgatgacgacatcctgatcctcactgctgaccacggttgtgatccgacctggaccggtactgaccacacgcgtgaacacattccggtactggtttacggcccgaaagtaaaaccgggctcactgggtcaccgtgaaaccttcgcggatattggtcagactctggcaaaatattttggtacttctgatatggaatatggcaaagccatgttctgataatgggtgcggcttgatgccctcaccccggccctctcccacagggagagggtgaaaacatgttgataaggataaaacaatggctaccccacacattaatgcagaaatgggcgatttcgctgacgtagttttgatgccaggcgacccgctgcgtgcgaagtatattgctgaaactttccttgaagatgcccgtgaagtgaacaacgttcgcggtatgctgggcttcaccggtacttacaaaggccgcaaaatttccgtaatgggtcacggtatgggtatcccgtcctgctccatctacaccaaagaactgatcaccgatttcggcgtgaagaaaattatccgcgtgggttcctgtggcgcagttctgccgcacgtaaaactgcgcgacgtcgttatcggtatgggtgcctgcaccgattccaaagttaaccgtatccgttttaaagaccatgactttgccgctatcgctgactttgacatggtgcgtaacgcggtagacgcggctaaagcactgggtgttgatgctcgcgttggtaacctgttctccgctgacctgttctactctccggacggcgaaatgttcgacgtgatggaaaaatacggcatcctcggcgtggaaatggaagcggctggtatctacggcgtcgctgcagaatttggcgcgaaagccctgaccatctgcaccgtgtctgaccacatccgcactcacgagcagaccactgccgctgagcgtcagaccaccttcaacgacatgatcaaaatcgcactggaatccgttctgctgggcgataaagagtaattgtgtttcgctgaaaggcgattgtcgtgttaagccggagtgggagactgctccggcttttagtatctattcatcaatagcaactgatttatagatttactattatttttcatatagataaaaaataaaatacattcaagtatctattcacgaatctattcatttatgttcagccgtcatccaggaagggcatatcagcaactctggtggacaaccataaatttctgccattttgcttttgatgtttgagctaagccgttccgtcttttcgatctgttttagagaattaatcgagatacctaacattttacttacttcagcaagcgataatttatgcctgatacgcacggcggctagccaggaaatacgctggctgaacattaaattgataatctcccgttcctggttttccagatcgatcatatttccttccctggatattttaatcagcgagttaccttaccgcccccgctatccacgtcgacaacttccgtagctctttttcctggtccgggaagtcaaccaacagcgcttcgcactcttgttgcagcatatccgcgcggtacaggcagccttgcagtcgcccggcgagggcttccagcggcgcggggttgaggctgtcggtaaacacctgggcgcgggtgatatggcctttttcaacgtcgaaatgcagttccacgccgccccagctaaagcgttcatccagcagatgcgagaatgccggagcctgaccgaagttccattcccagctactctgacgggcaaaggtttcggcgaagtttggcaagtctggcgttttgtccggggagatgatttccgcttctacacgctcgccataatgggcgaaaaaggccttggttatggcctcgcaaacctgctcatgggtgatccccggcagcagctcggtgaggttggtcacgcgggaacgcactgaggtaatgcctttcgccgccagtttctttttatccggattgagatagtttgccaggcggctaaggtcggcattgagcagcaaggtgccgtggtggaagccacgatctttggtttcgcgataggccgatcctgagactttgcggtcgccttcggcggttttcaccaccagatcgttacgcccggacgcttcggcgctgacgccaagcgcgttcagcgcattgagcacaatcgacgtggagatggttttatcgtactccggcttgccagccataaaggtaaagcaggtattgccgagatcgtggaacaccgcgccgccaccgctactgcgccgtgccaggcggacgttatcttcttccatccgccgggtattacactctttccacgggttctgcgcgcgaccaatcactaccgtgtcggcattgcgccagagaaacagaacgcgctgcgtggcgggcatctggcgaaaaatacactcctccaccgccaggttaaaccatgggtcgtaagagtcagagatgagcaggcgtaatgtggacataacgatttcctttcttgtagtaatgggtcactcttttttctcgctttcttcctcttccggcaccggtttgctggcggttaacaggaagggcgattgctgccagcgggtacgtttaccctgtagcagcgtgcgggtcagcactacgccgattgccagtgaaagcagcaacatcaggcgtaaaatgttagtggtgttatccacctgttgggcttcggtggcgagcgtatgggtgtcgagcgtcaggcgcagatagccgagcggtccgtttttcccggcaattggttcgacaatctgctggttaaaatagccgcccgcttttttaccgtcgagcgccagccggtcgcgcacttcgacgctttcgccagaacgggcgataagatcgccttgttcgtcatacacgcccgcgtcgaggatacggctttcatccgttaactgatcgaggatcgcctgaatgcgtttttcatccggcgagtcggtacgcatcagcggtgcaacgttcagcgttacctgacgcgccagggtgcgggccagttcttccagctgtggattacgttgtcgctggtggttttgactaaaccatgacgctccctgcatcagcgccactaacaaggcaagacagaacaggacaatcactgcccgatgcagccggaatttcagttttgtgcgagccatcttccaccctttgaaaatttgagacttaatgttgccagaagcaatggatacaaggtagcctcatgcgttattttccctgcttcgaacgattttacaggagccttaatgcctaacattacctggtgcgacctgcctgaagatgtctctttatggccgggtctgcctctttcattaagtggtgatgaagtgatgccactggattaccacgcaggtcgtagcggctggctgctgtatggtcgtgggctggataaacagcgtctgacccaataccagagcaaactgggtgcggcgatggtgattgttgccgcctggtgcgtggaagattatcaggtgattcgtctggcaggttcactcaccgcacgggctacgcgcctggcccatgaagcgcaactggatgtcgccccgctggggaaaatcccgcacctgcgcacgccgggtttgctggtgatggacatggattccaccgccatccagattgaatgtattgatgaaattgccaaactggccggaacgggcgagatggtggcggaagtaaccgaacgggcgatgcgcggcgaactcgattttaccgccagcctgcgcagccgcgtggcgacgctgaaaggcgctgacgccaatattctgcaacaggtgcgtgaaaatctgccgctgatgccaggcttaacgcaactggtgctcaagctggaaacgctgggctggaaagtggcgattgcctccggcggctttactttctttgctgaatatctgcgcgacaagttgcgcctgaccgccgtggtagccaatgaactggagatcatggacggtaaatttaccggcaatgtgatcggcgacatcgtagacgcgcagtacaaagcgaaaactctgactcgcctcgcgcaggagtatgaaatcccgctggcgcagaccgtggcgattggcgatggagccaatgacctgccgatgatcaaagcggcagggctggggattgcctaccatgccaagccaaaagtgaatgaaaaggcggaagtcaccatccgtcacgctgacctgatgggggtattctgcatcctctcaggcagcctgaatcagaagtaattgctcgcccgccatcctgcgggcggcacagcattaacgaggtacaccgtggcaaaagctccaaaacgcgcctttgtttgtaatgaatgcggggccgattatccgcgctggcaggggcagtgcagtgcctgtcatgcttggaacaccatcaccgaggtgcgtcttgctgcgtcgccaacggtggcgcgtaacgagcgtctcagcggctatgccggtagcgccggggtggcaaaagtccagaaactctccgatatcagccttgaagagctgccgcgtttttccaccggatttaaagagttcgaccgcgtactaggcggcggcgtggtgccaggaagtgccattctgattggcggtaaccctggtgcggggaaatccacgctgttgctgcaaacgctgtgcaaactggcccagcagatgaaaacgctgtatgtcaccggcgaagagtcgctgcaacaggtggcaatgcgcgctcatcgccttggcctgccgactgacaatctcaatatgttgtcggaaaccagcatcgagcagatctgcctgattgccgaagaagagcaaccgaagctgatggtaattgactcgatccaggtgatgcatatggcggatgtacagtcatcgcctggcagcgtggcgcaggtgcgtgaaacggcggcttatctgacgcgcttcgccaaaacgcgcggtgtggcgattgtcatggttgggcacgtaaccaaagatggctcgctggctggccctaaagtgctggaacactgtatcgactgttcggtgcttctggatggtgatgccgactcccgttttcgcaccttgcgcagccataaaaaccgcttcggcgcggtgaatgagctgggcgtcttcgcgatgaccgaacaggggctgcgtgaagtcagcaacccttcggcaattttcttaagtcgcggagatgaagtgacctccggcagctccgtgatggtggtgtgggaaggaacgcgtccgttgctggtggagattcaggcgctggtcgatcactcgatgatggcgaatccgcgccgcgtggcagtggggctggaacaaaaccgtctggcaatcctgctggctgtcttgcaccgtcacggtggtctgcaaatggccgatcaggatgtatttgtgaacgtggtcggcggcgtgaaggtaaccgaaaccagtgccgatttagctttactgctggcgatggtttccagcctgcgtgacagaccgctgccacaggatctggtggtgtttggtgaagtcgggctggcaggggagatccgcccggtgcccagcggtcaggaacgaatttcagaagcggcgaaacacggttttcgccgggcgattgttccggcggctaacgtaccgaaaaaagcgccggaagggatgcagatttttggcgttaaaaaactctccgacgcgcttagcgtgttcgacgacttataatgagagatacggagggagatatgtcgtcatttgattacctgaaaactgccatcaagcaacagggctgcacgctacagcaggtagctgatgccagcggtatgaccaaagggtatttaagccagttactgaatgccaaaattaaaagccccagcgcgcaaaagctggaggcgttgcaccgttttttggggcttgaatttccccgacagaagaaaaccattggtgtcgtattcggtaagttctacccgctgcataccggacatatctaccttatccagcgcgcctgtagccaggttgacgagctgcatatcattatgggttttgacgatacccgcgaccgcgcgttgtttgaagacagcgccatgtcgcagcagcccacggtgccggatcgtctgcgctggttattacaaacttttaaatatcagaaaaatattcgcattcatgctttcaacgaagagggcatggagccgtatccgcacggctgggatgtgtggagcaacggcatcaaaaagtttatggctgaaaaggggattcagccggacctgatctacacctcggaagaagccgatgcgccacagtatatggaacatctggggatcgatacggtgctggtcgatccgaaacgtacctttatgagtatcagcggtgcgcagatccgcgaaaacccgttccgctactgggaatatattcctacggaagtgaagccgttctttgtgcgtaccgtggcgatccttggcggcgagtcgagcggtaaatccaccctggtaaacaaacttgccaatatcttcaataccaccagtgcgtgggaatatggtcgcgattatgtcttttcacacctcggcggtgatgagatcgcattgcagtattccgactacgataaaatcgcgctgggccacgcacaatacattgattttgcagtgaaatacgccaataaagtggcgtttattgacactgattttgtcactacccaggcgttctgcaaaaagtacgaagggcgtgagcatccgttcgtgcaggcgttgattgatgaataccgtttcgatctggtgatcctgctggagaacaacacgccgtgggtggcggatggtttacgcagcctcggcagttcggtggatcgcaaagagttccagaacttgctggtggagatgctggaagagaacaatatcgaattcgtgcgggttgaagaggacgattatgacagccgtttcctgcgctgcgtggagctggtgcgggagatgatgggggagcagagataaccgcgatgaaacggctcaaaggcgaggtataaaataagttttttgatgagttgaaaacctttctggaagaggctgtcgagattaaacaaggtttgaaaaaacctgcacgggtgacccgctacgaaattgcggatactaaggctgttgtaggccggaaaaggcgttcacgccgtatccggcattcggtgctcaatgcctgatgcgacgcttaccgcgtcttatcaggcctggagattcacaacgtattgaaatttcttggtttgtaggccggataaggcgttcacgccgcatccggcattttacgcattacttcgcaatacgcttgtacttgatacgcttcggctccagtgcgtctgcgcccagcgtgcgtttcttgtactcttcgtactcagtaaagttaccttcgaagaactcaactttaccttcatcctggtagtccaggatgtgcgtggcgatacggtcgaggaaccaacggtcgtgcgagataaccatcgcacagcccgggaactccagcagggcgttttccagcgcgcgcagggtttcgatatccaggtcgttggttggttcgtcgagcagcagcatgttgccgccaacctgcagcagcttcgccagatgcagacgaccgcgctcaccaccggaaagttcaccaacgcgtttaccctgatcaacccctttaaagttaaagcggccaacgtaggcgcggcttggcatctcggtgttgccgatcttcataatatccagcccgccggaaacttcttcccaaacggttttgctgttatccattgagtcacggaactgatcaaccgatgccagtttcaccgtttcacctaaagtgatggtgccgctgtccggctgttcctgaccagagatcatacggaacagggtcgatttacccgcgccgttcggaccgatgatcccgacgattgccccttttgggatcgagaagctcaggtcatcaatcagcaggcgatcaccgtaggatttacgcaggttgctgacttccagcactttatcgcccagacgcggtccaggtggaataaacagttcgttggtttcgttacgtttctgatattcggtgctgttcagctcttcaaagcgtgccagacgtgctttacctttcgactggcggcctttagttccctgacgtacccactccagctctttctcgatcgacttacgacgcgccgcttcttgtgaagcttcctgcgccaggcgctgatctttctgctccagccaagaggagtagttgccttcccacggaataccttcaccgcggtcaagttcgaggatccagcctgcaacgttatcgaggaagtaacggtcgtgggtaatcgccaccacggtgccctcgaagtcgtgcaggaagcgttccagccaggccacggattcggcatccaggtggttggtcggttcgtcgagcagcagcatgtctggtttttccagcagcaggcggcacaacgctacgcgacgacgctcaccaccggagaggttagcgattttcgcgtcccagtccggcagacgtagcgcatccgccgcacgctccagctgtacgttcaggttatgaccgtcgtgagcctgaatgatctcttccagacggccttgttcagcggccagcttgtcaaaatcggcatccggatcggcgtacagcgcatacacttcatccaggcgtttcagggcgttaaccacttcagaaaccgcttcttcaatggactcacgcacggtgtgttccgggttcagctgcggttcctgcggcaggtaaccaatcttgatgtctggctgcggacgcgcttcaccttcgatgtctttatcaatgcccgccataatgcgcagcagggtagacttacccgcgccgttcagacccaggacaccaatttttgccccagggaagaaactcagagagatgtttttcaaaatatgacgtttcggcggaacaactttgccgacacgatgcatggtataaacgaattgagccacgttggacttcgcctctatgtttatcgtgatgatgagttttcaaaggcgaagtgtagcctttttccccgcctaatcccagttggtcgatcaccttcgcagtaaaagtaaaaaagtgtccgtaacgtggcgtaaacggcaatgactggttagcataaatctattacgcggcatgacgctgcattgatgtatttacacttagaggatgcgcttgtggaaaaagccaaacaagttacctggcggctgttggctgccggtgtctgtctgctgacggtcagcagcgtggcgcgagccgactcactggatgagcagcgtagccgttacgcgcaaatcaagcaggcctgggataatcgacaaatggatgtggtcgaacaaatgatgcctggactgaaggattatccgctttatccctacctggaataccgccagatcaccgatgatctgatgaatcaaccggcggtgacggtcactaactttgttcgcgctaaccccacgcttcctcccgctcgcacgctgcaatctcgtttcgtcaatgaactggcgcggcgtgaagactggcgtggcttgttagcctttagcccggaaaagcccggaactaccgaagcgcaatgtaattactactatgcgaaatggaacaccgggcagagtgaagaagcctggcaaggggcgaaagagctgtggctaaccggcaagagccagcctaacgcctgtgacaagttatttagcgtctggcgtgcgtcaggtaaacaagatccgctggcttatttagagcgtatccgtctggcgatgaaagcgggtaacactggcctggtaacagtgctggcagggcagatgcctgccgattaccagactatcgcctcggcaatcatttcactggcgaacaaccctaatacggtactgaccttcgcgcgtacaaccggagcgaccgattttacccgtcaaatggcggcggtggcgtttgccagtgtggcgcggcaggatgctgaaaatgcacggctgatgatcccgtcgcttgcccaggcgcagcagcttaatgaagatcagattcaggagctgcgcgatatcgtcgcctggcgtttgatgggcaacgatgtcaccgacgagcaggcgaaatggcgcgatgacgccattatgcgctcgcaatccacgtcgttgattgaacgccgtgtgcgaatggcacttggcaccggcgatcgtcgcggcctgaatacctggctggcgcgtctgccgatggaagcaaaagagaaagatgaatggcgttactggcaggcggatttattgctggaacgcggacgtgaagctgaagcgaaagagattttgcatcaactcatgcaacagcgtggtttctacccgatggttgcagcacaacgcatcggagaagagtatgagctgaagattgataaagcgccgcagaatgttgacagcgccctgactcaggggccggagatggcgcgcgtgcgcgagttgatgtactggaatctcgataacaccgcgcgtagcgagtgggccaatctggtgaagagcaagtcaaaaacagagcaggctcaactggctcggtatgctttcaataaccaatggtgggatcttagcgttcaggcaacgatcgccgggaagctttgggatcatctggaagagcgattcccgctggcttacaacgatcttttcaaacgttacaccagtgggaaagagatcccgcaaagctatgcgatggcgattgcccgtcaggagagcgcctggaatccgaaagtgaaatcaccggtaggggccagcggcctgatgcagattatgcctggtacagcgacccatacggtgaagatgttctctattcctggttatagcagccctgggcaattgctggatccggaaacgaatatcaacattggcaccagttacctgcaatatgtttatcagcagtttggcaataaccgtattttctcctcagcagcttataacgccggacctggacgggtgcgaacctggcttggcaacagcgccgggcgtatcgacgctgtggcatttgtcgagagtattccgttctccgagacgcgcggttatgtgaagaacgtgctggcttatgacgcttactaccgctatttcatgggggataaaccgacgttgatgagcgccacggaatggggacgtcgttactgatccgcacgtttatgatatgctatcgtactctttagcgagtacaaccgggggaggcattttgcttcccccgctaacaatggcgacatattatggcccaacaatcaccctattcagcagcgatggcagaacagcgtcaccaggagtggttacgttttgtcgacctgcttaagaatgcctaccaaaacgatctccatttaccgttgttaaacctgatgctgacgccagatgagcgcgaagcgttggggactcgcgtgcgtattgtcgaagagctgttgcgcggcgaaatgagccagcgtgagttaaaaaatgaactcggcgcgggcatcgcgacgattacgcgtggatctaacagcctgaaagccgcgcccgttgagctgcgccagtggctggaagaggtgttgctgaaaagcgattgattttgtaggcctgataagacgcggcagcgtcgcatcaggcatcgtgcaccgaatgccggatgcggcgtgaacgccttatccgtcctacaaatacccgtaatttcaatatgtttggtaggcatgataagacgcggcagcgtcgcatcaggcgcttaatacacggcattatgaaacggactcagcgccaggatcaccgcctggtgatagacgctggcgcgagtgagtttcccggcggtaaacacgccgatcgccccttccttacgaccaatctcatcaataccggtataacgcgacatcacgggaccaagcgcctcaccttcacgcactttttccagaatcaccgcaggcaacggcaaagtagccgaacgcgcctcgccgcgctggctggcgttttcaatcaccacccaactgaaagtgctgtcaccatcaatgccagcttcaatcgccacccaaaaatcagcctctggaagtaaacggcgggcatttgctacccgatttcgtgcgccagcgcgcgtttcctcactgccaaagggctgttccggtacaccgctctcgacggcaacggatgcaatatggcaggatccttcgccgaagatctcgtgaaatgcctgcagaatggcctgaattttagcgggattggtggtcgcacagacaacttggtgcataatcagcattactcagaaaattaacgttacagcagtatacggaaaaaaagcatgttacaggtatacctagtccgccacggtgaaacgcagtggaacgccgagcgacgtattcagggccagtctgacagcccgctgaccgccaaaggtgagcaacaggcgatgcaggtggcgacgcgtgccaaagagcttggcattacgcatatcatcagcagcgatttagggcgcacccggcgtacggcggaaatcatcgcccaggcctgcggctgtgacatcatctttgattctcgcctgcgtgaattaaacatgggtgtgctggaaaaaagacatatcgattctctgaccgaagaagaagagaactggcgtcggcagctggtcaatggcaccgttgacgggcgtattcctgaaggcgagtcaatgcaggagctcagcgatcgcgtcaatgcggcactggaatcttgccgggacttaccgcagggaagccgaccgctgctggtgagtcatggtattgcactgggatgcctggtgagtacgattctcggattaccagcatgggcagagcgccgcttacgtctgcgtaactgttctatttcgcgcgtggattatcaggaaagcctgtggctggcgtctggctgggtcgttgaaaccgcaggggacatctcgcatctggacgcccctgcattagatgagctgcagcgttaacggcggataggaatcagcagttcacagcgcagattaattgggcgatctcccgctttggcgtcttctgccgggtagtatcgctcaatatcctgacctttacggcgcgtcaggttgagcattggcatgcacgttccgtataccgtcaggataaactcctgcacgccggttcccagaccttcataggtaaacatcacatattcgccgccctgcagcatcaccggatgccccgtcagtacatagccatctgcctgatcctgggctaacgcggtggtatagaatacctcttgttcgtcgtctttatcctgactcggacgcgtttcattcaggccgtagagcactggcggaatggtcggcgcgttgccgagaaaatcgtgccagaactgataacgcatttcatggcggaaatcagagatttgctccagcgaacaggagtagctctgggtaacaccaatcagcggcgtatcttccagggtgacaaatttatgctctggcatagtgaattcacccagacgcagcggcgggcgaataccaaaggcgctccattcaggagaacggcggtaaagtgcaggagtctgggcaaactgcttcttgaatgcgcgggtaaatgtctgttgagagtcgaagcggtattgcagcgcgatgtccagaatcggacgcgcagtcaggcgtagtgcgaccgccgatttcgacaaacgacgagcacgaatatacgcgccaatagcatggccagtgacatctttaaacattctctgtaagtgccacttggaataacctgctttcgccgctacattgtcgagcgacaggggctgatccagatgaccttccagccagattaaaaggtcgcgaataatgccggcctgatccataaaatatcctcatcctttcaacaacgagcacctgacatcaggtaattggataatagcattttttgctgttttagcattcagtgtttttttcttagtagagtatgttttaggtcttgacggaaataaaagtattgagattttgttcttaatcaatatgttatttaccgtgacgaactaattgctcgtgtaatagataaaaatggtaacaatatgaaatacaagcatttgatcctgtctttaagcctgataatgctggggccattggctcatgcagaagagattggttcggtcgacaccgtatttaaaatgatcggcccggatcacaaaattgttgtggaagcctttgacgatcccgatgtgaaaaatgtcacctgttatgtgagccgggcgaaaacaggtggtattaaagggggattgggtctggcggaagatacctccgatgcggctatttcttgtcagcaagtcgggccgattgaactgtcggatcgtattaaaaacggcaaagctcagggcgaggtagtattcaaaaaacgcacgtccctggtctttaagtcgttacaggtcgtgcgcttttatgacgccaaacgcaacgcgctcgcttatctggcttactccgacaaagttgtagaaggttcgccgaaaaacgcgattagcgcggttcctgtcatgccgtggcggcaataacagaggcgatttatgcaacgggaaacggtctggttagtggaagatgagcaagggatagccgacacgctggtctacatgttgcagcaggaaggttttgccgtcgaggtctttgagcgaggcttgccggtgctggataaagctcgccagcaggttcccgacgtcatgattctcgatgttggtttgcctgatatcagcggctttgaattgtgccgccagttactggcgctccatccggcgttacctgtactgttcctgacggcccgaagtgaagaggtcgatcgcctgcttgggctggaaattggcgctgacgactatgtggctaaaccgttttcaccccgcgaagtgtgcgccagggtgcgcaccttactgcgtcgggtgaagaagttctcgtcgccgtctcccgtcatccgtattggtcattttgaattgaatgaacccgcggcgcagatcagctggtttgacacgccattaacgctgacgcggtatgagtttttattgctgaagacgttactcaagtcgccaggccgcgtctggtcccgccagcaactaatggatagcgtgtgggaagatgcgcaggacacctacgatcgcaccgtcgatacccacattaaaacgttgcgtgccaagctgcgcgccatcaaccccgatctttctccgattaatactcatcgcggcatgggatatagcctgaggggcctgtaatgcgtatcggcatgcggttgctgctgggctattttttactggtggcggtggcggcctggttcgtactggctatttttgtcaaagaagttaaaccgggcgtgcgaagagcaacggaggggacgttaatcgataccgcaacgttgctggcggagctggcgcgtcccgatttgctctctggggacccaacgcatgggcaactggcgcaggcgtttaatcagctacaacatcgcccgtttcgcgccaatatcggtggcattaacaaagtgcgcaatgaatatcatgtctatataaccgattcgcagggtaaagtattgttcgattcggcaaataaagccgttgggcaggattattcgcgctggaatgacgtctggctaacgttgcgtggtcagtatggtgcgcgcagcacgttgcaaaatcctgccgatcccgaaagttcggtgatgtatgttgccgcgccgattatggacggctcgcggcttattggcgttttgagcgtaggcaaaccgaacgcggcgatggctccggtcattaagcgtagcgagcggcgaattttatgggccagcgccattttgctggggattgcactggtgattggcgcaggcatggtttggtggatcaaccgctccattgcccggctcactcgctatgccgattccgtcactgacaataagcccgttcctcttcctgaactcggcagtagcgagttgcgtaagcttgcgcaggcgctggaaagtatgcgcgtgaagctggaagggaaaaactatattgagcagtatgtttatgcgttaacccatgagctaaaaagcccactggcggcgattcgtggcgcggcggaaattttacgcgaaggtccgccaccggaagtggtggctcgttttaccgacaacattctgacgcaaaatgcgcgtatgcaggcattggtagaaacgttactacgccaggcaagactggagaatcgtcaggaagtcgttctgactgttgttgatgtggcggcattatttcgccgcgtcagcgaagcgcgcaccgtgcagttggcagaaaaaaacatcactctacatgttatgcccactgaggttaatgttgctgctgaaccggcgttactggagcaggcgctggggaatttactggataacgccatcgattttacccccgagagcggtcgcataacgctaagcgccgaagtggatcaggaacacgtcgcccttaaggtgctggataccggtagtggtattcctgactacgcgctgtcacgtatttttgaacgcttttactctttgccgcgtgcaaatgggcaaaaaagcagcggtctggggttggcgttcgtcagtgaggtcgcccgtttgtttaacggcgaagtcacgctgcgcaacgtgcaggaaggtggcgtgctggcctcgcttcgacttcaccgtcacttcacatagcttcaaattcttcccacatagccttcgtatcctgctgccattgcaaaggagaagactatgttgaaatcccccctgttctggaaaatgaccaccctgtttggtgccgtattgctgttgttgattccgataatgctgattcggcaggtgattgtcgaacgtgccgattaccgtagcgatgtggaagatgcgattcgccaaagtaccagcgggccgcaaaaactcgttgggccgcttatcgctattcctgtgaccgagctttatacggtacaggaagaggataaaaccgtggagcggaaacgaagttttatccatttttggttacctgagtcattgatggttgatggcaatcagaacgtggaagaacgcaagatagggatttataccggtcaggtctggcacagtgatttaacgctaaaagccgatttcgatgtttcgcgtcttagcgaactcgacgcgccaaatatcacctttggcaagccatttattgtgattagcgtcggggatgcgcgtggtattggtgtggtgaaagcgcctgaagttaacggaacggcgctgaccattgaacccggcaccgggttagagcaaggcgggcagggcgtgcatatccctttacccgaaggggactggcggaagcagaacctgaagctgaatatggccctgaatttaagcggtaccggcgatctttctgtggtgcctgccgggcgtaatagcgaaatgaccttaaccagcaactggccgcatcccagttttttaggtgattttttgccagccaaacgggaagttagcgagtcaggttttcaggcgcaatggcaaagcagctggtttgctaataatctcggtgagcgttttgcttcaggcaatgataccggctgggaaaacttccccgcgtttagcgtcgcagtgacgacgccagccgatcaataccaattaacggaccgggcgactaagtacgccattctgctgattgcactgacttttatggcgttctttgtttttgaaacgctcaccgcgcaacgtttacacccaatgcaatatttgctggtggggctttcattggtgatgttttatttgctcttgctggcgctttctgaacatatcggttttaccgtggcatggataatcgccagtctgattggggcgttaatgaacggtatttatttgcaggcggtattgaaaggctggcgcaacagcatgttgtttaccctcgcgctgttgttgctggatggtgtgatgtggggactgctcaactctgccgatagcgcgctgttgttgggaaccagtgtgctggtggtggcgctggccggcatgatgtttgtgactcgtaatatcgactggtatgcgttttcactgccgaaaatgaaagccagtaaagaagttacaatggacgatcaattacgtatctggaaataaggttgaaaaataaaaacggcgctaaaaagcgccattttttttgacggtggtaacgccgattaatcttccagatcaccgcagaagcgataaccttcaccgtggatggtggcgatgatttccggcgtatccggcgtagattcgaaatgtttacgaatacggcggatcgtcacgtctacagtacggtcgtgtggtttcagctcacggccggtcattttcttcagcagttcagcacgggactgaattttgcctgggttttcacagaagtgaagcatggcgcggaactcgctgcgcggcagcttgtactgctcgccatcagggccgatcaacgaacggctgttgatgtccagttcccaaccattgaacttgtagctttcaacgctacgacgttcttcgctgacagtacccagattcatggtacgggacagcaggttgcgtgcacgaatcgtcagttcacgcgggttgaacggtttggtgatgtagtcatctgcaccgatttcgaggccgagaattttatcgacttcgttgtcacggccagtcaggaacatcaacgcaacattcgcctgctcgcgcagttcacgcgctaacagaagaccgttcttacccggcagattgatatccatgatcaccaggttgatgtcatattcagagaggatctgatgcatttccgcgccatctgtcgcttcgaaaacatcatagccttccgcttcgaaaatacttttcaacgtgttgcgtgttaccaactcgtcttcaacgataagaatgtgcggggtctgcatgtttgctacctaaattgccaactaaatcgaaacaggaagtacaaaagtccctgacctgcctgatgcatgctgcaaattaacatgatcggcgtaacatgactaaagtacgtaattgcgttcttgatgcactttccatcaacgtcaacaacatcattagcttggtcgtgggtactttccctcaggacccgacagtgtcaaaaacggctgtcatcctaaccattttaacagcaacataacaggctaagaggggccggacacccaataaaactacgcttcgttgacatatatcaagttcaattgtagcacgttaacagtttgatgaaatcatcgtatctaaatgctagctttcgtcacattattttaataatccaactagttgcatcatacaactaataaacgtggtgaatccaattgtcgagatttattttttataaaattatcctaagtaaacagaaggatatgtagcattttttaacaattcaaccgttagtacagtcaggaaatagtttagccttttttaagctaagtaaagggctttttctgcgacttacgttaaggatttgtaaattcgcaccgcgtaataagttgacagtgatcaccctgttcgcggtcatttggtcaagaagagtggcaatatgcgtataacgattattctggtcgcacccgccagagcagaaaatattggggcagcggcgcgggcaatgaaaacgatggggtttagcgaactgcggattgtcgatagtcaggcacatctggagccagccactcgctgggtcgcacatggatctggtgatattattgataatattaaagttttcccgacactggttgaatcgttacacgatgtcgatttcactgtcgccaccactgcgcgcagtcgggcgaaatatcattactacgccacgccagttgaactggtgccgctgttagaggaaaaatcttcatggatgagccatgccgcgctggtgtttggtcgcgaagattccgggttgactaacgaagagttagcgttggctgacgttcttactggtgtgccgatggtggcggattatccttcgctcaatctggggcaggcagtgatggtctattgctatcaattagcaacattaatacaacaaccgacgaaaagtgacacaacggcagaccaacatcaactgcaagctttacgcgaacgagtcatggcattgctgacgactctggcagtggcagatgacataaaactggtcgactggttacagcaacgcctggggcttttagagcaacgagacacggcaatgttgcaccgtttgctgcatgatattgaaaaaaatatcaccaaataaaaaacgccttagtaagtatttttc
